(19) United States
(12) Patent Application Publication
(10) Pub. No.: US 2011/0105554 A1
(43) Pub. Date: May 5, 2011

(54) MEANS FOR TREATING MYOSIN-RELATED DISEASES

(75) Inventors: Dietmar Manstein, Hannover (DE); Roman Fedorov, Hannover (DE); Georgios Tsiavaliaris, Hannover (DE); Hans-Joachim Knölker, Dresden (DE); René Martin, Dresden (DE); Juliane Kirst, Dresden (DE); Herwig Gutzeit, Dresden (DE); Markus Böhl, Dresden (DE)

(73) Assignee: KINARIS BIOMEDICALS GMBH, DRESDEN (DE)

(21) Appl. No.: 12/744,282

(22) PCT Filed: Nov. 21, 2008
(86) PCT No.: PCT/EP08/09891

§ 371 Date: Jan. 24, 2011

Related U.S. Application Data
(60) Provisional application No. 60/989,773, filed on Nov. 21, 2007.

(51) Int. Cl. A61K 31/473; C07D 207/30; C07D 333/08; C07D 307/02; C07D 209/82; C07D 219/04; A61K 31/40; A61K 31/381; A61K 31/341; A61K 31/403; G06G 7/48; G01N 33/566

(52) U.S. Cl. 514/297; 548/563; 549/80; 549/505; 548/440; 546/103; 514/427; 514/438; 514/461; 514/411; 703/11; 436/501

(57) ABSTRACT

The present invention provides a method of designing a modulator of a myosin, the method comprising molecular modeling of a compound such that the modeled compound interacts with at least three amino acid residues of said myosin, said residues being selected from (a) ranges K265-V268, V411-L441, N588-Q593, D614-T629, and V630-E646 of SEQ ID NO: 2, said myosin comprising or consisting of (i) the sequence of SEQ ID NO: 2; (ii) the sequence encoded by the sequence of SEQ ID NO: 1; (iii) a sequence being at least 40% identical to the sequence of SEQ ID NO: 2 or to the sequence encoded by the sequence of SEQ ID NO: 1; or (iv) a sequence encoded by a sequence being at least 40% identical to the sequence of SEQ ID NO: 1; wherein said sequence of (iii) or (iv) comprises said three amino acid residues, and wherein said residues comprise K265; or (b) ranges of any one of SEQ ID NOs: 4, 6, 8, 10, 12, 14, 16, 18, 20, 22, 24, 26, 28, 30, 32, 34, 36, 38, 40, 42, 44, 46, 48, 50, 52, 54, 56, 58, 60, 62, 64, 66, 68, 70, 72, 74, 76, 78, 80, 82, 84, 86, 88, 90, 92, 94, 96, 98, 100, 102, 104, 106 or 108, respectively, said ranges aligning with the ranges of SEQ ID NO: 2 as defined in (a), said myosin comprising or consisting of (i) the sequence of any one of SEQ ID NO: 4, 6, 8, 10, 12, 14, 16, 18, 20, 22, 24, 26, 28, 30, 32, 34, 36, 38, 40, 42, 44, 46, 48, 50, 52, 54, 56, 58, 60, 62, 64, 66, 68, 70, 72, 74, 76, 78, 80, 82, 84, 86, 88, 90, 92, 94, 96, 98, 100, 102, 104, 106 or 108, respectively; (ii) the sequence encoded by the sequence of any one of SEQ ID NO: 3, 5, 7, 9, 11, 13, 15, 17, 19, 21, 23, 25, 27, 29, 31, 33, 35, 37, 39, 41, 43, 45, 47, 49, 51, 53, 55, 57, 59, 61, 63, 65, 67, 69, 71, 73, 75, 77, 79, 81, 83, 85, 87, 89, 91, 93, 95, 97, 99, 101, 103, 105, 107 or 109; respectively; (iii) a sequence being at least 40% identical to the sequence of any one of SEQ ID NO: 4, 6, 8, 10, 12, 14, 16, 18, 20, 22, 24, 26, 28, 30, 32, 34, 36, 38, 40, 42, 44, 46, 48, 50, 52, 54, 56, 58, 60, 62, 64, 66, 68, 70, 72, 74, 76, 78, 80, 82, 84, 86, 88, 90, 92, 94, 96, 98, 100, 102, 104, 106 or 108, respectively, or to the sequence encoded by the sequence of any one of SEQ ID NO: 3, 5, 7, 9, 11, 13, 15, 17, 19, 21, 23, 25, 27, 29, 31, 33, 35, 37, 39, 41, 43, 45, 47, 49, 51, 53, 55, 57, 59, 61, 63, 65, 67, 69, 71, 73, 75, 77, 79, 81, 83, 85, 87, 89, 91, 93, 95, 97, 99, 101, 103, 105, 107 or 109, respectively; or (iv) a sequence encoded by a sequence being at least 40% identical to the sequence of any one of SEQ ID NO: 3, 5, 7, 9, 11, 13, 15, 17, 19, 21, 23, 25, 27, 29, 31, 33, 35, 37, 39, 41, 43, 45, 47, 49, 51, 53, 55, 57, 59, 61, 63, 65, 67, 69, 71, 73, 75, 77, 79, 81, 83, 85, 87, 89, 91, 93, 95, 97, 99, 101, 103, 105, 107 or 109, respectively; wherein said sequence of (iii) or (iv) comprises said three amino acid residues, and wherein said residues comprise the residue aligning with K265 of SEQ ID NO: 2; thereby obtaining said modulator of a myosin. Furthermore provided are a method of identifying a modulator of a myosin, pharmaceutical compositions and methods of treating cardiovascular diseases, cancer, diseases of the central nervous system, viral infections, and infections by parasites of the Apicomplexa family.

[0001] This invention relates to a method of designing a modulator of a myosin, the method comprising molecular modeling of a compound such that the modeled compound interacts with at least three amino acid residues of said myosin, said residues being selected from (a) ranges K265-V268, V411-L441, N588-Q593, D614-T629, and V630-E646 of SEQ ID NO: 2, said myosin comprising or consisting of (i) the sequence of SEQ ID NO: 2; (ii) the sequence encoded by the sequence of SEQ ID NO: 1; (iii) a sequence being at least 40% identical to the sequence of SEQ ID NO: 2 or to the sequence encoded by the sequence of SEQ ID NO: 1; or (iv) a sequence encoded by a sequence being at least 40% identical to the sequence of SEQ ID NO: 1; wherein said sequence of (iii) or (iv) comprises said three amino acid residues, and wherein said residues comprise K265; or (b) ranges of any one of SEQ ID NOs: 4, 6, 8, 10, 12, 14, 16, 18, 20, 22, 24, 26, 28, 30, 32, 34, 36, 38, 40, 42, 44, 46, 48, 50, 52, 54, 56, 58, 60, 62, 64, 66, 68, 70, 72, 74, 76, 78, 80, 82, 84, 86, 88, 90, 92, 94, 96, 98, 100, 102, 104, 106 or 108, respectively, said ranges aligning with the ranges of SEQ ID NO: 2 as defined in (a), said myosin comprising or consisting of (i) the sequence of any one of SEQ ID. NO: 4, 6, 8, 10, 12, 14, 16, 18, 20, 22, 24, 26, 28, 30, 32, 34, 36, 38, 40, 42, 44, 46, 48, 50, 52, 54, 56, 58, 60, 62, 64, 66, 68, 70, 72, 74, 76, 78, 80, 82, 84, 86, 88, 90, 92, 94, 96, 98, 100, 102, 104, 106 or 108, respectively; (ii) the sequence encoded by the sequence of any one of SEQ ID NO: 3, 5, 7, 9, 11, 13, 15, 17, 19, 21, 23, 25, 27, 29, 31, 33, 35, 37, 39, 41, 43, 45, 47, 49, 51, 53, 55, 57, 59, 61, 63, 65, 67, 69, 71, 73, 75, 77, 79, 81, 83, 85, 87, 89, 91, 93, 95, 97, 99, 101, 103, 105, 107 or 109, respectively; (iii) a sequence being at least 40% identical to the sequence of any one of SEQ ID NO: 4, 6, 8, 10, 12, 14, 16, 18, 20, 22, 24, 26, 28, 30, 32, 34, 36, 38, 40, 42, 44, 46, 48, 50, 52, 54, 56, 58, 60, 62, 64, 66, 68, 70, 72, 74, 76, 78, 80, 82, 84, 86, 88, 90, 92, 94, 96, 98, 100, 102, 104, 106 or 108, respectively, or to the sequence encoded by the sequence of any one of SEQ ID NO: 3, 5, 7, 9, 11, 13, 15, 17, 19, 21, 23, 25, 27, 29, 31, 33, 35, 37, 39, 41, 43, 45, 47, 49, 51, 53, 55, 57, 59, 61, 63, 65, 67, 69, 71, 73, 75, 77, 79, 81, 83, 85, 87, 89, 91, 93, 95, 97, 99, 101, 103, 105, 107 or 109, respectively; or (iv) a sequence encoded by a sequence being at least 40% identical to the sequence of any one of SEQ ID NO: 3, 5, 7, 9, 11, 13, 15, 17, 19, 21, 23, 25, 27, 29, 31, 33, 35, 37, 39, 41, 43, 45, 47, 49, 51, 53, 55, 57, 59, 61, 63, 65, 67, 69, 71, 73, 75, 77, 79, 81, 83, 85, 87, 89, 91, 93, 95, 97, 99, 101, 103, 105, 107 or 109, respectively; wherein said sequence of (iii) or (iv) comprises said three amino acid residues, and wherein said residues comprise the residue aligning with K265 of SEQ ID NO: 2; thereby obtaining said modulator of a myosin.

[0002] In this specification, a number of documents including patent applications and manufacturer's manuals are cited. The disclosure of these documents, while not considered relevant for the patentability of this invention, is herewith incorporated by reference in its entirety.

[0003] Myosins are motor proteins which are involved in a large number of motility processes. By decomposing, more specifically hydrolysing ATP, myosins generate a directed force which permits movement along actin filaments. Known myosin-dependent processes include muscle contraction, cell division, movements of entire cells, intracellular transport of organelles and vesicles, endocytosis as well as maintenance and modification of actin-rich structures such as the cytoskeleton.

[0004] Cellular motility as well as aberrant forms thereof are involved in numerous diseases and conditions including cardiovascular diseases, cancer, malaria, and diseases of the central nervous system. Known inhibitors of myosin such as Blebbistatin (Kovacs M, Toth J, Hetenyi C, Malnasi-Csizmadia A, Sellers J R. J. Biol. Chem. 2004, 279: 35557-35563), BDM (2,3-butanedione monoxime) and BTS (N-benzyl-p-toluol-sulfonamide) (Cheung A, Dantzig J A, Hollingworth S, Baylor S M, Goldman Y E, Mitchison T J, Straight A F. Nat. Cell Biol. 2002, 4: 83:8) lend themselves, in view of their lack of specifity, high toxicity, and associated side effects, not or only to a very restricted extent to therapeutic applications.

[0005] Laatsch et al. (Chem. Pharm. Bull. 43(4) 537-546 (1995)) and Fenical (Chem. Rev. 1993, 93, 1673-1683) describe pentabromopseudilin (2,3,4-tribromo-5-(3,5-dibromo-2-hydroxyphenyl)-1H-pyrrole), further pseudilins as well as their anti-tumor and anti-microbial properties.

[0006] In view of the limitations of the means and methods of the prior art, the technical problem underlying the present invention was therefore the provision of improved or alternative means and methods for the treatment of myosin-related diseases.

[0007] Accordingly, this invention relates to a method of designing a modulator of a myosin, the method comprising molecular modeling of a compound such that the modeled compound interacts with at least three amino acid residues of said myosin, said residues being selected from (a) ranges K265-V268, V411-L441, N588-Q593, D614-T629, and V630-E646 of SEQ ID NO: 2, said myosin comprising or consisting of (i) the sequence of SEQ ID NO: 2; (ii) the sequence encoded by the sequence of SEQ ID NO: 1; (iii) a sequence being at least 40% identical to the sequence of SEQ ID NO: 2 or to the sequence encoded by the sequence of SEQ ID NO: 1; or (iv) a sequence encoded by a sequence being at least 40% identical to the sequence of SEQ ID NO: 1; wherein said sequence of (iii) or (iv) comprises said three amino acid residues, and wherein said residues comprise K265; or (b) ranges of any one of SEQ ID NOs: 4, 6, 8, 10, 12, 14, 16, 18, 20, 22, 24, 26, 28, 30, 32, 34, 36, 38, 40, 42, 44, 46, 48, 50, 52, 54, 56, 58, 60, 62, 64, 66, 68, 70, 72, 74, 76, 78, 80, 82, 84, 86, 88, 90, 92, 94, 96, 98, 100, 102, 104, 106 or 108, respectively, said ranges aligning with the ranges of SEQ ID NO: 2 as defined in (a), said myosin comprising or consisting of (i) the sequence of any one of SEQ ID NO: 4, 6, 8, 10, 12, 14, 16, 18, 20, 22, 24, 26, 28, 30, 32, 34, 36, 38, 40, 42, 44, 46, 48, 50, 52, 54, 56, 58, 60, 62, 64, 66, 68, 70, 72, 74, 76, 78, 80, 82, 84, 86, 88, 90, 92, 94, 96, 98, 100, 102, 104, 106 or 108, respectively; (ii) the sequence encoded by the sequence of any one of SEQ ID NO: 3, 5, 7, 9, 11, 13, 15, 17, 19, 21, 23, 25, 27, 29, 31, 33, 35, 37, 39, 41, 43, 45, 47, 49, 51, 53, 55, 57, 59, 61, 63, 65, 67, 69, 71, 73, 75, 77, 79, 81, 83, 85, 87, 89, 91, 93, 95, 97, 99, 101, 103, 105, 107 or 109, respectively; (iii) a sequence being at least 40% identical to the sequence of any one of SEQ ID NO: 4, 6, 8, 10, 12, 14, 16, 18, 20, 22, 24, 26, 28, 30, 32, 34, 36, 38, 40, 42, 44, 46, 48, 50, 52, 54, 56, 58, 60, 62, 64, 66, 68, 70, 72, 74, 76, 78, 80, 82, 84, 86, 88, 90, 92, 94, 96, 98, 100, 102, 104, 106 or 108, respectively, or to the sequence encoded by the sequence of any one of SEQ ID NO: 3, 5, 7, 9, 11, 13, 15, 17, 19, 21, 23, 25, 27, 29, 31, 33, 35, 37, 39, 41, 43, 45, 47, 49, 51, 53, 55, 57, 59, 61, 63, 65, 67, 69, 71, 73, 75, 77, 79, 81, 83, 85, 87, 89, 91, 93, 95, 97, 99, 101, 103, 105, 107 or 109, respectively; or (iv) a sequence encoded by a sequence being at least 40% identical to the sequence of any one of SEQ ID NO: 3, 5, 7, 9, 11, 13, 15, 17, 19, 21, 23, 25, 27, 29, 31, 33, 35, 37, 39, 41, 43, 45, 47, 49, 51, 53, 55, 57, 59, 61, 63, 65, 67, 69, 71, 73, 75, 77, 79, 81, 83, 85, 87, 89, 91, 93, 95, 97, 99, 101, 103, 105, 107 or 109, respectively; wherein said sequence of (iii) or (iv) comprises said three amino acid residues, and wherein said residues comprise the residue aligning with K265 of SEQ ID. NO: 2; thereby obtaining said modulator of a myosin.

[0008] The term “designing” refers to the creation of a molecule, preferably by in silica methods. In addition to in silica methods, further steps may be performed in the method of designing according to the invention, which may include synthesizing of a compound and/or optimization of said compound. Such optional further steps are detailed below.

[0009] As regard the in silica methods for creating molecules, these are commonly referred to as molecular modelling. Particularly envisaged for the present invention are molecular modeling tools which are also referred to as ligand construction tools. Such methods for rational drug design typically take into account properties including shape, charge distribution, the distribution of hydrophobic groups, ionic groups and groups capable of forming hydrogen bonds at a site of interests of the protein molecule under consideration. Using this information, that can be derived from the high resolution structure of proteins and protein-ligand complexes (see, e.g. Example 2), these methods either suggest improvements to existing molecules, construct new molecules on their own that are expected to have good binding affinity, screen through virtual compound libraries for such molecules or fragments thereof, or otherwise support interactive design of new drug compounds in silica. Typically, ligand construction makes use of dedicated software and involves interactive sessions in front of a computer display of the three-dimensional structure of the target molecule, i.e., myosin, and of candidate molecules or fragments thereof. Suitable software packages are known in the art and include Chemoffice (CambridgeSoft Corporation), CNS (Acta Cryst. D54, 905-921), CCP4 (Acta Cryst. D50, 760-763), ADF (Computational Chemistry, David Young, Wiley-Interscience, 2001. Appendix A. A.2.1 p. 332) and Gold (G. Jones, P. Willett and R. C. Glen, J. Mol. Biol., 245, 43-53, 1995; G. Jones, P. Willett, R. C. Glen, A. R. Leach and R. Taylor, J. Mol. Biol., 267, 727-748, 1997; M. L Verdonk, J. C. Cole, M. J. Hartshorn, C. W. Murray and R. D. Taylor, Proteins, 52, 609-623, 2003). As a result of modifications of candidate or starting molecules, the modeled compound is obtained.

[0010] The coordinates of the target molecule, i.e. myosin, may be experimentally determined e.g. by NMR spectroscopy and/or X-ray crystallography, or may be obtained by molecular modeling, preferably homology modeling using the high resolution structure of a myosin, said high resolution structure being determined by experimental means, to estimate and calculate the structure of a different myosin for which an experimentally determined high resolution structure is not yet available. Suitable software is known in the art and includes the software packages described in Example 2 enclosed herewith. Structures of myosin-2 from Dictyostelium with and without exemplary or preferred compounds are provided in Examples 2 and 7.

[0011] The term “interact” or “interaction” as used herein refers to a relation between at least two molecular entities. This relation may inter alia be described in terms of intermolecular distances and/or free energies of interaction. In the first case, an interaction may be defined by at least one intermolecular distance, preferably by more than one such as two, three, four, five or more intermolecular distances. If an interaction according to the invention is to be described in terms of intermolecular distances only, it is envisaged to use at least three such distances. Typically, intermolecular distances are determined as distances between the centers of atoms of the respective interacting molecular entities. In this case, intermolecular distances according to the invention are referred to as interatomic distances. Preferably, a such determined interatomic distance is less than 4 Angstroms, more preferably in the range from 3.6 and 2.8 Angstroms. Preferred values include 3.4, 3.2 and 3.0 Angstroms. Alternatively or in addition, an interaction may be defined in terms of free energy. The free energy may be a total free energy determining the strength of an intermolecular interaction in its entirety or a partial free energy, said partial free energy resulting from, for example, one atom-atom interaction within a plurality of atom-atom interactions within the intermolecular interaction under consideration. Preferably, the total free energy of an interaction according to the invention is at least 60 kJ/mol. This value corresponds to the binding energy of about three hydrogen bonds. More preferred are total free energies of an interaction of at least 100, at least 150 or at least 200 kJ/mol.

[0012] As an alternative or additional parameter, and in case of inhibitors, the IC₅₀ concentration may be used to characterize the strength of an intermolecular interaction. The IC₅₀ concentration is the concentration of an inhibitor that is required to inhibit 50% of the target, in the present case myosin. Preferably, the modelled compound, in case it is an inhibitor, interacts with said at least three residues such that the IC₅₀ concentration is in the two-digit micomolar range, i.e. below 100 μM. More preferred are IC₅₀ concentrations below 50 μM, below 10 μM or below 1 μM. Yet more preferred are nanomolar or even picomolar inhibitors, e.g. inhibitors with an IC₅₀ concentration below 100 nM, below 10 nM, below 1 nM or below 100 μM. More generally speaking, and applicable to any binding molecule, the concentration that is required to achieve binding to 50% of the target or modulating of 50% of the target may be used. Preferred values of IC₅₀ concentrations as recited above apply also to these concentrations.

[0013] An intermolecular interaction may comprise one or more types of interactions. Types of interactions include charge-charge, charge-dipole, and dipole-dipole interactions and furthermore hydrogen bonds and hydrophobic interactions. Dipoles may be permanent, induced or fluctuating. Interactions involving permanent dipoles and hydrogen bonds may be of particular relevance, since they are capable of specifically positioning and orienting a ligand or modulator in a binding pocket.

[0014] The ranges according to part (a) of the main embodiment provide a generic description of the binding pocket according to the present invention. Since at least three residues within these ranges interact with the compound to be modelled, the present invention also provides an implicit definition of pharmacophores capable of binding to said binding pocket. The term “pharmacophore” is known in the art and refers to the molecular framework responsible for the biological or pharmacological activity of a compound (Osman F. Güner (2000) Pharmacophore Perception, Development, and use in Drug Disgn ISBN 0-9636817-6-1; Thierry Langer and Rémy D. Hoffmann (2006) Pharmacophores and Pharmacophore Searches ISBN 3-527-31250-1). Preferred activities of the compound include the modifying of myosin activities as described herein below. Typical pharmacophore features include hydrogen bond donors, hydrogen bond acceptors, dipoles, charges, ions and hydrophobic moieties. The pharmacophore furthermore includes information on the spatial arrangement of one or more of such moieties:

[0015] The term “modulator” as used herein refers to any molecule capable of modifying the activity of the target, i.e. myosin. “Modifying” includes increasing and decreasing said activity. The activity includes any molecular, biochemical, biomechanical or biological activity. A preferred activity is the capability of myosin to produce force and/or movement in an actin- and/or Mg-ATP dependent way; see below. A further activity is ATPase activity, i.e., the capability to hydrolyze adenosine trisphosphate (ATP), preferably to yield ADP and Pᵢ. In structural terms, the modulator is not limited. Preferably, the modulator is a small organic molecule, the term “small” preferably referring to molecules with a molecular weight below 1200, 1000, 800, 600, 500, 400 or 300 Da.

[0016] The term “myosin” refers to a well-known class of proteins with ATPase activity and having the capability of generating force and/or directional movement; see also the background section herein above. Table 1 below provides further information on myosins to be used in the present invention.

1: Summary of Myosins

| | | | NCBI Accession | | |
|---|---|---|---|---|---|
| Class | Subclass | Myosin (name) | number | Function | Literature |
| 1 | BBM | Hs Moysin-1A (MYO1A) | NM_005379; | Cell motility | Bement et al., 1994, |
| | Iα | Hs Myosin-1B (MYO1B) | AF127026; | Vesicular transport | Hofmann et al., 2006 |
| | Iβ | Hs Myosin-1C (MYO1C) | AF009961 | Endocytosis | Ruppert et al., 1993, |
| | 1γ | Hs Myosin-1D (MYO1D) | NM_012223; | Exocytosis | Salas-Cortes et al., 2005 |
| | IC | Hs Myosin-1E (MYO1E) | XM_290989 | Signal transduction | Bement et al., 1994; - |
| | — | Hs Myosin-1F (MYO1F) | NM_001080779 | Transcription | Hasson et al., 1996; - |
| | — | Hs Myosin-1G (MYO1G) | NM_015194; | Trafficking | Bement et al., 1994; |
| | — | Hs Myosin-1H (MYO1H) | XM_050041 | Neurosensory functions | Krendel et al., 2007 |
| | | | NM_004998 | Cell morphology | Crozet et al., 1997; - |
| | | | NM_012335 | Left-right asymmetry | Scherer et al., 2003; - |
| | | | NM_033054; | | Venter et al., 2001; - |
| | | | XM_291223, | | |
| | | | XM_374431 | | |
| | | | NM_001101421; | | |
| | | | XM_001125815 | | |
| 2 | Skeletal muscle | Hs heavy chain 1 (MYH1), skeletal muscle | NM_005963 | Muscle contraction | Leinwand et al., 1983 |
| | Cardiac muscle | (adult) | NM_017534 | Muscle contraction | Eller, et al., 1989 |
| | non-muscle | Hs heavy chain 2 (MYH2), skeletal muscle | NM_001100112 | Cytokinesis, cortical | Winters et al., 1998; |
| | smooth muscle | (adult, var1) | NM_002470 | bundling, morphogenesis, | Schachat and Briggs, 2002 |
| | Extra ocular | Hs heavy chain 2 (MYH2), skeletal muscle | NM_017533 | cell motility/migration, | Solomon et al., 1990 |
| | Not defined | (adult, var2) | NM_003802 | carcinogenesis | Solomon et al., 1990; |
| | Not defined | Hs heavy chain 3 (MYH3), skeletal muscle | NM_002471 | Muscle contraction | Pegoraro et al., 2007 |
| | Not defined | (embryonic) | NM_000257 | | Desjardins et al., 2002 |
| | | Hs heavy chain 4 (MYH4), skeletal muscle | XM_371398 | | Simons et al., 1991 |
| | | Hs heavy chain 13 (MYH13), skeletal muscle | NM_002473 | | Andzelm et al., 2007 |
| | | Hs heavy chain 8 (MYH8), skeletal perinatal | XM_290747 | | Matsuoka et al., 1993; |
| | | Hs heavy chain 6 (MYH6), cardiac muscle | NM_002474; | | Zhang et al., 2006 |
| | | alpha | NM_022870 | | Desjardins et al., 2002 |
| | | Hs heavy chain 7 (MYH7), cardiac muscle beta | NM_001040114 | | Desjardins et al., 2002; |
| | | Hs heavy chain 7 (MYH7B), cardiac muscle | NM_022844 | | Donaudy et al., 2004 |
| | | beta | NM_001040113 | | Desjardins et al., 2002 |
| | | Hs heavy chain 9 (MYH9), non muscle | NM_001077186 | | |
| | | Hs heavy chain 10 (MYH10), non-muscle | NM_024729 | | |
| | | Hs heavy chain 11 (MYH11), smooth muscle | NM_014981; | | |
| | | varSM1A | XM_036988; | | |
| | | Hs heavy chain 11 (MYH11), smooth muscle | XM_938225 | | |
| | | varSM1B | | | |
| | | Hs heavy chain 11 (MYH11), smooth muscle | | | |
| | | varSM2A | | | |
| | | Hs heavy chain 11 (MYH11), smooth muscle | | | |
| | | varSM2B | | | |
| | | Hs heavy chain 13 (MYH13) | | | |
| | | Hs heavy chain 14 (MYH14), var1 | | | |
| | | Hs heavy chain 14 (MYH14), var2 | | | |
| | | Hs heavy chain 15 (MYH15) | | | |
| 3 | Myosin-3a | Hs myosin-3A (Myo3A) | NM_017433 | Phototransduction and | Dose et al., 2000; |
| | Myosin-3b | Hs myosin-3B (Myo3B), var1 | NM_001083615 | hearing processes | Walsh et al., 2002 |
| | | | | | Dose and Burnside, 2002 |
| 5 | Myosin-5a | Hs Myosin-5a (MYO5A) | NM_00259 | Intracellular trafficking | Engle and Kennett, 1994; |
| | Myosin-5b | Hs Myosin-5b (MYO5B) | NM_001080467; | and transport processes | Desnos et al., 2007 |
| | Myosin-5c | Hs Myosin-5c (MYO5C) | XM_371116 | (mitochondrial transport, | Bement et al., 1994; |
| | | | NM_018728 | melanosomal transport, | Lapierre et al., 2001 |
| | | | | mRNA, organelles, cargo) | Bement et al., 1994; |
| | | | | in neuronal cells and other | Rodriguez and Cheney, 2002 |
| | | | | cell types | |
| 6 | Myosin-6 | Hs myosin-6 (MYO6) | NM_004999; | Reverese directional | Bement et al., 1994; |
| | | | XM376516 | transport processes, | Dunn et al., 2006 |
| | | | | clathrin-mediated | |
| | | | | endocytosis, neurosensory | |
| | | | | functions | |
| 7 | Myosin-7a | Hs myosin-7a (MYO7A) | NM_000260 | Cell adhesion, filopodia | Bement et al., 1994; |
| | | | | extensions, stereocilia | Jaijo et al., 2007 |
| | | | | organization, | |
| | | | | neurosensory functions | |
| 9 | Myosin-9a | Hs myosin-9a (MYO9A) | NM_006901 | Signaltransduction | Bement et al., 1994 |
| | Myosin-9b | Hs myosin-9b (MYO9B) | NM_004145 | Lamellipodia, fillopodia | Bement et al., 1994; |
| | | | | extensions | Sanchez et al., 2007 |
| 10 | Myosin-10 | Hs myosin 10 (MYO10) | NM_012334 | Filopodia | Hasson et al., 1996; |
| | | | | formation/dynamics | Bohil et al., 2006 |
| | | | | Function in cell motility | |
| | | | | Neuronal growth cone | |
| 11 | Myosin-11 | Plant myosins (tobacco, Arabidopsis | | Cytoplasmic streaming | Shimmen, 2007; |
| | | thaliana, . . .) | | Transport | Lee and Liu, 2004; |
| | | | | | Volkmann et al., 2003 |
| 14 | Toxoplasma | Tg myosin-A (TgMyoA) | AF006626 | Gliding motility host cell | Heintzelman and |
| | gondii | Tg myosin-B (TgMyoB) | AF438184 | invasion processes | Schwartzman, 1997 |
| | Plasmodium | Tg myosin-E (TgMyoE) | AF221131 | | Delbao et al., 2001 |
| | falciparum | Pf myosin-A | AF105117 | | Delbao and Soldati, |
| | | | | | unpublished |
| | | | | | Foth et al., 2006 |
| 15 | Myosin-15a | Hs unconventional myosin-15a (Myo15A) | AF144094 | Neurosensory functions | Liang et al., 1999 |
| | Myosin-15b | Hs unconventional myosin-15b (Myo15B) | NR_003587 | | Berg et al., 2001; |
| | | | | | Boger et al., 2001 |
| 16 | Myosin-16 | Hs myosin-16 (Myo16) | BC146791 | Neuronal functions | Strausberg et al., 2002 |
| 18 | Myosin-18a | Hs myosin-18a (MYO18A), var1 | NM_078471 | “Carcinogenesis” | Furusawa et al., 2000; |
| | Myosin-18b | Hs myosin-18a (MYO18A), var2 | NM_203318 | | Mori et al., 2003 |
| | | Hs myosin-18b (MYO18B) | NM_032608 | | Mori et al, 2003; |
| | | | | | Yang et al., 2005 |
| | | | | | Dunham et al., 1999; |
| | | | | | Edakuni et al., 2006 |
| 19 | Myosin-19 | Hs myosin-19 (Myo19) | BC008900 | ? | Strausberg et al., 2002 |
| 22 | Toxoplasma | Tgmyosin-F (TgMyoF) | DQ131541 | Invasion processes, . . . | Foth et al., 2006 |
| | gondii | | | | |

[0017] Sequence alignments of myosins motor domains are shown in the Figures enclosed herewith. These sequence alignments have been created with methods well known and established in the art. The multiple sequence alignments have been generated with the software ClustalW (see below) by using the following parameters: Gap Penalty: 15.00; Gap Length Penalty: 0.5; Delay Divergent Seqs (%): 15; Protein Weight Matrix: Gonnet Series.

[0018] The invention is applicable to all myosin isoforms, in particular to the myosins having sequences of the sequence listing. Several sequences of the sequence listing correspond to sequences with the below accession numbers for the NCBI databases (www.pubmed.com) in the versions of Nov. 11, 2008. Preferred myosin isoforms are human, Apicomplexa and plant isoforms.

### Human Myosins

[0019] 1. H.s. myosin IA (MYO1A), NM_{—}005379
[0020] 2. H.s. myosin IB (MYO1B), NM_{—}012223
[0021] 3. H.s. myosin IC (MYO1C), NM_{—}001080779
[0022] 4. H.s. myosin ID (MYO1D), NM_{—}015194
[0023] 5. H.s. myosin IE (MYO1E), NM_{—}004998
[0024] 6. H.s. myosin IF (MYO1F), NM_{—}012335
[0025] 7. H.s. myosin IG (MYO1G), NM_{—}033054
[0026] 8. H.s. myosin IH (MYO1H), NM_{—}1001101421
[0027] 9. H.s. myosin heavy chain 1, skeletal muscle, adult (MYH1), NM_{—}005963
[0028] 10. H.s. myosin heavy chain 2, skeletal muscle, adult (MYH2), NM_{—}017534
[0029] 11. H.s. myosin heavy chain 3, skeletal muscle, embryonic, (MYH3), NM_{—}002470
[0030] 12. H.s. myosin heavy chain 4, skeletal muscle (MYH4), NM_{—}017533
[0031] 13. H.s. myosin heavy chain 6, cardiac muscle alpha (MYH6), NM_{—}002471
[0032] 14. H.s. myosin heavy chain 7, cardiac muscle, beta (MYH7), NM_{—}000257
[0033] 15. H.s. myosin heavy chain 7B, cardiac muscle, beta (MYH7B), NM_{—}020884
[0034] 16. H.s. myosin heavy chain 8, skeletal muscle perinatal (MYH8), NM_{—}002472
[0035] 17. H.s. myosin heavy chain 9, non-muscle (MYH9), NM_{—}002473
[0036] 18. H.s. myosin heavy chain 10, non-muscle (MYH10), NM_{—}005964
[0037] 19. myosin heavy chain 11, smooth muscle A (MYH11), NM_{—}002474; NM_{—}022844
[0038] 20. H.s. myosin heavy chain 11, smooth muscle B (MYH11), NM_{—}001040114; NM_{—}001040113
[0039] 21. H.s. myosin heavy chain 13, skeletal muscle (MYH13), NM_{—}003802
[0040] 22. H.s. myosin heavy chain 14 (MYH14), AY 165122
[0041] 23. H.s. myosin heavy chain 14 (MYH14), NM_{—}001077186, NM_{—}024729
[0042] 24. H.s. myosin heavy chain 15 (MYH15), NM_{—}014981
[0043] 25. H.s. myosin IIIA (MYO3A), NM_{—}017433
[0044] 26. H.s. myosin IIIB (MYO3B), NM_{—}001083615
[0045] 27. H.s. myosin VA (MYO5A), NM_{—}000259
[0046] 28. H.s. myosin VB (MYO5B), NM_{—}001080467
[0047] 29. H.s. myosin VC (MYO5C), NP_{—}061198
[0048] 30. H.s. myosin VI (MYO6), NM_{—}004999
[0049] 31. H.s. myosin VIIA (MYO7A), NM_{—}000260
[0050] 32. H.s. myosin IXA (MYO9A), NM_{—}006901
[0051] 33. H.s. myosin IXB (MYO9B), NM_{—}004145
[0052] 34. H.s. myosin X (MYO10), NM_{—}012334
[0053] 35. H.s. myosin XVA (MYO15A), AF144094
[0054] 36. H.s. myosin XVI (MYO16, Myr8), NP_{—}055826
[0055] 37. H.s. myosin XVIIIA (MYO18A), NM_{—}078471; NM_{—}203318
[0056] 38. H.s. myosin XVIIIB (MYO18B), NM_{—}032608
[0057] 39. H.s. myosin XIX (MYO19), BC008900

### Plasmodium and Toxoplasma Myosins

[0058] 1. P.f. MyoA, AF105117
[0059] 2. P.f. MyoF, Q286V9
[0060] 3. T.g. MyoA, AF006626
[0061] 4. T.g. MyoB, AF438184
[0062] 5. T.g. MyoC, AF438183
[0063] 6. T.g. MyoD, AF105118
[0064] 7. T.g. MyoF, DQ131541

[0065] The ranges as defined in part (b) of the main embodiment are readily determined based on (i) the information regarding the ranges in the sequence of SEQ ID NO: 2 (myosin-2) as defined in part (a) of the main embodiment and (ii) said sequence alignments. Preferably, the alignment of said ranges occurs over the entire length of the respective ranges as recited in parts (a) and (b); see also the enclosed alignments (in particular FIGS. 2 to 4).

[0066] For example, the corresponding, i.e., aligning ranges in the sequence of SEQ ID NO: 4 (myosin-1) are as follows: K186-V190, C342-N362, N523-F528, P549-T561, and A562-L577, and the corresponding ranges in the sequence of SEQ ID NO: 6 (myosin-5) are as follows: K246-V250, K392-N413, N568-Y573, L613-T635, and V636-L651.

[0067] These ranges as well as the ranges recited in part (a) of the main embodiment define structural elements of the three-dimensional structure of the respective myosin or secondary structure elements thereof. In particular, the five ranges in their respective order correspond to the following structural elements, the designations of which are established in the art: helix 13, helix 21, strut loop, loop2, and helix-29; see also the enclosed multiple sequence alignments (in particular FIGS. 2 to 4) as well as the schematic drawing of the topology of myosin-2 (FIG. 1). As shown in the enclosed Figures, these structural elements form a previously unknown binding pocket of myosins. This binding pocket was found by the present inventors to be an allosteric binding pocket. The term “allosteric” is known in the art and refers to an alteration of conformation in response to ligand binding. Ligand binding occurs at a site which is not the active site or one of the active sites of the target (here myosin), but exerts a modulating effect on the active site(s). This modulation involves structural changes which in turn frequently entail functional changes. In other words, binding of ligands to this pocket induces or locks, respectively, a conformation of myosin. The induced or locked conformation may be an active or inactive conformation. The term “activity” is defined herein above. Preferably, said induced or locked conformation is an inactive conformation, e.g. a conformation of myosin with reduced or absent ATPase activity and/or reduced or absent actin binding capability and/or force generating activity. Alternatively, said induced or locked conformation may be an activated conformation. It is preferred that the activated conformation has a higher force generating activity.

[0068] The amino acid residues K265 as recited in part (a) is an anchor residue for the interaction of a modulator with the binding pocket defined by the ranges recited in part (a). A corresponding anchor residue in the sequence of SEQ ID NO: 4 (myosin-1) is K186. A corresponding anchor residue in the sequence of SEQ ID NO: 6 (myosin-5) is K246. Corresponding anchor residues of further myosins can be determined from the enclosed multiple sequence alignments without further ado. As used herein, the term “anchor residue” refers to residues of particular relevance for the interaction between a myosin and a modulator thereof. The residue of any myosin which aligns with K265 of SEQ ID NO: 2 (myosin-2) is almost invariably a Lys residue. It may also be an Arg residue.

[0069] Sequence identity levels as recited in the main embodiment may be determined by methods well known in the art. Two nucleotide or protein sequences can be aligned electronically using suitable computer programs known in the art. Such programs comprise BLAST (Altschul et al. (1990), J. Mol. Biol. 215, 403-410), variants thereof such as WU-BLAST (Altschul & Gish (1996), Methods Enzymol. 266, 460-480), FASTA (Pearson & Lipman (1988), Proc. Natl. Acad. Sci. USA 85, 2444-2448), CLUSTALW (Higgins et al. (1994), Nucleic Acids Res. 22, 4673-4680) or implementations of the Smith-Waterman algorithm (SSEARCH, Smith & Waterman (1981), J. Mol. Biol. 147, 195-197). These programs, in addition to providing a pairwise sequence alignment (multiple sequence alignment in case of CLUSTALW), also report the sequence identity level (usually in percent identity) and the probability for the occurrence of the alignment by chance (P-value).

[0070] Preferably the sequence identity at the amino acid sequence level between myosins is at least 45%, 50%, 55%, 60%, 65%, 70%, 75%, 80%, 85%, 90%, 95%, 96%, 97%, 98% or 99%. Preferred sequence identities at the nucleic acid sequence level are at least 50%, 60%, 70%, 75%, 80%, 85%, 90%, 92%, 94%, 95%, 96%, 97%, 98% or 99%. In any case, it is deliberately envisaged to use myosins from mammalian and avian species including Rattus norvegicus, Mus musculus, Gallus gallus, Lepus europaeus and Canis lupus.

[0071] In a further embodiment, the method of designing of the invention further comprises synthesizing said modulator, thereby producing said modulator. The subject-matter of this embodiment is a method of producing said modulator. This embodiment is particularly envisaged for those cases where the modulator is a small organic molecule, a peptide or protein. Means and methods for synthesizing peptides and proteins are well known in the art and may involve organic synthesis and/or the recombinant production using the methods of molecular biology and protein biochemistry. As regards small organic molecules, reference is made to the Beilstein database available from MDL Information Systems as an example. Means and methods for preparing the preferred compound classes (for details see below) to be used in screens according to the invention are detailed in the Examples enclosed herewith. In a further preferred embodiment, said molecular modeling comprises (i) measuring at least one intermolecular distance; (ii) calculating at least one free energy of interaction; and/or (iii) determining the accessibility to the allosteric binding pocket. Accessibility of the binding pocket limits the size of the allosteric effector and thereby the maximal intermolecular interaction energy.

[0072] Tools for molecular modeling as described above typically provide the option of measuring one or more intermolecular distances. Preferably, the intermolecular distances are determined as distances between the centers of atoms. Tools for molecular modeling also generally provide the option of calculating free energies of interaction. The term “free energy” in relation to an interaction is well known in the art and is related to the equilibrium binding constant by the equation ΔG=−RT ln K, wherein ΔG is the change in free energy upon binding, K is the binding constant, T is the temperature and R is the universal gas constant. Free energies to be calculated may be, as described above, total free energies and/or partial free energies.

[0073] In a further preferred embodiment, said ranges as defined in part (a) of the main embodiment are limited to the following positions: K265, A420, K423, A424, R428, L431, D590, I617, and A618. These positions or at least three of these positions provide a preferred definition of the binding pocket according to the invention. By defining the binding pocket, they implicitly also define the pharmacophore which is capable of binding to said binding pocket.

[0074] In case of the sequence of SEQ ID NO: 4 (myosin-1), preferred positions are K186, A355, E358, R359 N362, D521 and L527. Said preferred positions are located within the ranges as defined in the main embodiment. In case of the sequence of SEQ ID NO: 6 (myosin-5), preferred positions are K246, A402, H406, A409, N410, N413, D570, V572 and H632. Obviously, in further preferred embodiments of part (b) of the main embodiment (said preferred embodiments relating to SEQ ID NOs: 8 to 108 (even numbers)), preferred positions are those positions which align with K265, A420, K423, A424, R428, L431, D590, I617, and A618 of SEQ ID NO: 2. Analogous considerations apply to all preferred positions or ranges.

[0075] Further preferred anchor residues for modulator binding (in addition to the Lys residue described above) include D590 in the strut loop in Dictyostelium myosin-2 (SEQ ID NO: 2), which corresponds to D521 in Dictyostelium myosin-1 (SEQ ID NO: 4) and to D570 in Gallus gallus myosin-5 (SEQ ID NO: 6), respectively.

[0076] On the other hand, there residues in the allosteric binding pocket according to the invention which are specific for a given subclass of myosins such as class 2 myosins. Preferably, the method of designing according to the invention makes use of such subclass-specific residues to the effect that said modeled compound interacts with at least one of said subclass-specific residues. Modeled compounds interacting with at least one of said subclass-specific residues are candidates for subclass-specific modulators. More specifically, specificity is mostly mediated by residues in helix-21 that connects the actin binding cardiomyopathy loop (formed by residues 403 to 406 in myosin 2 (SEQ ID NO: 2)) with strand β5 which is part of the central β-sheet and adjacent to switch-2, forming part of the nucleotide binding pocket. The multiple contacts in helix-21 are structurally conserved but diverse as regards the nature of side chains involved in interactions. Conserved residues are A424, R428, and L431 in myosin-2 (SEQ ID NO: 2), A355, R359, and N362 in myosin-1 (SEQ ID NO: 4), and H406, N410, N413 in myosin-5 (SEQ ID NO: 6), respectively. Additional, preferably subclass-specific contacts with a compound binding to the allosteric pocket are provided by residues belonging to loop-2 and helix-29. The latter contacts are neither structurally conserved nor at the level of the side chains and thereby provide further possibilities in fine-tuning inhibitor binding and subclass-specificity thereof. Residues belonging to loop-2 and helix-29 are of particular importance in forming the opening of the access channel to the allosteric binding site of the invention. Specific residues in this region can be selected from the annotated sequence alignments and the topology diagram enclosed herewith (FIGS. 1 to 4).

[0077] The present invention furthermore provides a method of identifying a modulator of a myosin, the method comprising (a) bringing into contact a myosin and a test compound; (b) determining whether said test compound interacts with at least three amino acid residues selected from (ba) ranges K265-V268, V411-L441, N588-Q593, D614-T629, and V630-E646 of SEQ ID NO: 2, said myosin comprising or consisting of (i) the sequence of SEQ ID NO: 2; (ii) the sequence encoded by the sequence of SEQ ID NO: 1; (iii) a sequence being at least 40% identical to the sequence of SEQ ID NO: 2 or to the sequence encoded by the sequence of SEQ ID NO: 1; or (iv) a sequence encoded by a sequence being at least 40% identical to the sequence of SEQ ID NO: 1; wherein said sequence of (iii) or (iv) comprises said three amino, acid residues, and wherein said residues comprise K265; or (bb) ranges of any one of SEQ ID NOs: 4, 6, 8, 10, 12, 14, 16, 18, 20, 22, 24, 26, 28, 30, 32, 34, 36, 38, 40, 42, 44, 46, 48, 50, 52, 54, 56, 58, 60, 62, 64, 66, 68, 70, 72, 74, 76, 78, 80, 82, 84, 86, 88, 90, 92, 94, 96, 98, 100, 102, 104, 106 or 108, respectively, said ranges aligning with the ranges of SEQ ID NO: 2 as defined in (a), said myosin comprising or consisting of (i) the sequence of any one of SEQ ID NO: 4, 6, 8, 10, 12, 14, 16, 18, 20, 22, 24, 26, 28, 30, 32, 34, 36, 38, 40, 42, 44, 46, 48, 50, 52, 54, 56, 58, 60, 62, 64, 66, 68, 70, 72, 74, 76, 78, 80, 82, 84, 86, 88, 90, 92, 94, 96, 98, 100, 102, 104, 106 or 108, respectively; (ii) the sequence encoded by the sequence of any one of SEQ ID NO: 3, 5, 7, 9, 11, 13, 15, 17, 19, 21, 23, 25, 27, 29, 31, 33, 35, 37, 39, 41, 43, 45, 47, 49, 51, 53, 55, 57, 59, 61, 63, 65, 67, 69, 71, 73, 75, 77, 79, 81, 83, 85, 87, 89, 91, 93, 95, 97, 99, 101, 103, 105, 107 or 109, respectively; (iii) a sequence being at least 40% identical to the sequence of any one of SEQ ID NO: 4, 6, 8, 10, 12, 14, 16, 18, 20, 22, 24, 26, 28, 30, 32, 34, 36, 38, 40, 42, 44, 46, 48, 50, 52, 54, 56, 58, 60, 62, 64, 66, 68, 70, 72, 74, 76, 78, 80, 82, 84, 86, 88, 90, 92, 94, 96, 98, 100, 102, 104, 106 or 108, respectively, or to the sequence encoded by the sequence of any one of SEQ ID NO: 3, 5, 7, 9, 11, 13, 15, 17, 19, 21, 23, 25, 27, 29, 31, 33, 35, 37, 39, 41, 43, 45, 47, 49, 51, 53, 55, 57, 59, 61, 63, 65, 67, 69, 71, 73, 75, 77, 79, 81, 83, 85, 87, 89, 91, 93, 95, 97, 99, 101, 103, 105, 107 or 109, respectively; or (iv) a sequence encoded by a sequence being at least 40% identical to the sequence of any one of SEQ ID NO: 3, 5, 7, 9, 11, 13, 15, 17, 19, 21, 23, 25, 27, 29, 31, 33, 35, 37, 39, 41, 43, 45, 47, 49, 51, 53, 55, 57, 59, 61, 63, 65, 67, 69, 71, 73, 75, 77, 79, 81, 83, 85, 87, 89, 91, 93, 95, 97, 99, 101, 103, 105, 107 or 109, respectively; wherein said sequence of (iii) or (iv) comprises said three amino acid residues, and wherein said residues comprise the residue aligning with K265 of SEQ ID NO: 2; and (c) identifying those compounds which interact with said at least three amino acid residues, thereby indentifying said modulator of a myosin.

[0078] This embodiment relates to a screen for the identification of myosin modulators which in turn are suitable as medicaments or lead compounds for the development of a medicament. The screen may be implemented in various ways such as a biochemical screen or a cellular screen. In case of a cellular screen said “bringing into contact a myosin and a test compound” may be effected by bringing into contact a cell producing a myosin with a test compound. The bringing into contact is performed under conditions which allow binding of the test compound to myosin, in case the test compound is in principle capable of binding. Suitable conditions include conditions in liquid phase such as aqueous solutions, preferably buffered solutions. Furthermore, ionic strength may be adjusted, e.g., by the addition of sodium chloride. The concentration of sodium chloride may be between 0 and 2 M, preferably between 100 and 200 mM. Alternatively, sodium chloride is absent from the assay. For biological assays in many cases the presence of one or more further substances, including other salts than sodium chloride, trace elements, anti-oxidants, amino acids, vitamins, growth factors, ubiquitous co-factors such as ATP or GTP, is required. Said further substances may either be added individually or provided in complex mixtures such as serum. These and further accessory substances are well known in the art as are concentrations suitable for biological assays. The skilled person is aware of suitable conditions in dependency of the particular assay format to be used in the method of screening according to the invention.

[0079] In a further embodiment, the screen may be implemented as a virtual screen, i.e., the screen may be performed in silico. Virtual screens may be implemented by computer-based docking of one test compound at a time into the allosteric binding site defined above, wherein both the test compound and the binding site are represented in silico. Thereby, the binding position and conformation is calculated. The binding site may, for example, be comprised in a representation of the entire myosin molecule or, alternatively, of those parts only which line the binding pocket. Upon completion of docking, the binding affinity (or equivalently the free energy of interaction as defined herein above) is determined based on the parameters of the computer representation of the involved molecules. A threshold may be chosen such as to select those test compounds which are candidate high affinity binders. Suitable software packages are known in the art and include Chemoffice, CNS, CCP4, ADF and Gold (see above).

[0080] Preferably, said determining in step (b) is effected by X-ray crystallography and/or NMR spectroscopy.

[0081] In other words, the question of whether an interaction involving at least three residues of myosin occurs, is answered by determining structural parameters by using NMR spectroscopy or X-ray crystallography. These structural parameters may comprise the coordinates of the complex between said test compound and myosin. Alternatively, structural parameters may be determined only to the extent necessary to determine whether binding according to the invention, in particular interaction with at least three residues of myosin occurs. Examples of the latter, more selective methods include NMR spectroscopic methods exploiting the nuclear Overhauser effect or saturation transfer difference (STD). Suitable methods include the recording of NOESY and/or ROESY spectra. The required NMR spectra can be obtained in medium to high throughput manner, wherein throughput may be further increased by assessing a mixture of ligands, for example 10, 20 or 100 ligands at a time and further analyzing only those mixtures which are found to comprise one or more binding molecules. Also, means and methods for high throughput crystallization are available; see, for example, Stevens (Current Opinion in Structural Biology 2000, 10: 558-564) and Kuhn et al. (Current Opinion in Chemical Biology 2002, 6: 704-710).

[0082] In a preferred embodiment, X-ray crystallography comprises (a) generating a crystal of a complex formed by said test compound bound to myosin; (b) generating and recording x-ray diffraction data; (c) digitising the data; (d) calculating an electron density map; (e) determining the three-dimensional structure of the crystal components; and (f) storing the crystal coordinates generated on a data carrier.

[0083] X-ray diffraction may be performed on a beamline such as the 1029 beamline of ESRF, Grenoble or using in-house devices such as a Bruker X8PROTEUM. Data may be further processed with XDS (W. Kabsch, J. Appl. Cryst. 21, 67 (1988)) and refined with CNS (A. T. Brünger et al. Acta Cryst. D 54, 905 (1998)). Alternatively, the PROTEUM2 software (Bruker) may be used. Structure can finally be solved with, for example, AmoRe (J. Navaza, Acta Crystallogr. A 50, 157 (1994)) and analysed with Xfit (D. E. McRee, J. Struct. Biol. 125, 156 (1999)) while structure validatation may be performed with PROCHECK (R. A. Laskowski, M. W. MacArthur, J. Appl. Crystallogr. 26, 283 (1993)) and WHATCHECK (R. W. W. Hoot G. Vriend, C. Sander, E. E. Abola, Nature 381, 272 (1996)). The final map containing the atomic coordinates of the constituents of the crystal may be stored on a data carrier, typically the data is stored in PDB format or in X_PLOR format, both of which are known to the person skilled in the art. However, crystal coordinates may as well be stored in simple tables or text files.

[0084] In a preferred embodiment, the myosin used in the screen involving X-ray crystallography according to the invention is myosin-2. A co-crystal of myosin-2 with an exemplary inhibitor has been solved; see Example 2. Methods well know in the art such as soaking permit the generation of co-crystals of myosin-2 with other modulators. Performing X-ray crystallography according to the invention with such co-crystals is a means of providing the necessary information for identifying compounds which interact with said at least three amino acid residues.

[0085] In a preferred embodiment of the method of identifying according to the invention, said method further comprises the step of (a′) (i) determining whether said test compound binds to said myosin; and/or (ii) determining whether said test compound modulates the activity and/or conformation of said myosin; and/or (iii) determining the cytotoxicity of said test compound; wherein step (a) is to be effected after step (a) and prior to step (b), and wherein said determining in step (b) is performed with test compounds determined to bind, to modulate, and/or to be cytotoxic in step (a′).

[0086] This embodiment provides for filtering a subset of test compounds testing positive in one or more of the assays of (a′) (i) to (iii). The advantage of such filtering is that the subsequent determining whether the test compound interacts with at least three residues has to be done only with said test compounds testing positive.

[0087] Means and methods for determining binding are well known in the art and include assays based on fluorescence such as fluorescence resonance energy transfer (FRET) assays and fluorescence polarization (FP) assays, immunological assays such as ELISA, surface plasmon resonance, isothermal titration calorimetry and Fourier Transformed Infrared Spectroscopy (FTIR).

[0088] Assays for myosin activity are discussed further below.

[0089] Since the method of identifying a modulator according to the invention is designed to identify compounds binding to the allosteric pocket of myosins, an additional or alternative filtering step involves the determining whether the test compound modulates or changes the conformation of said myosin. A change in conformation may be determined by using methods known in the art including the determination of electrophoretic or chromatographic mobility and fluorescence-based methods. In the latter case, changes in intramolecular distances between fluorophors arising from a change of conformation may be determined.

[0090] Said cytotoxicity correlates with the inhibition of the ATPase activity of myosin. Cytotoxicity may be assayed by determining the cellular uptake of neutral red. Only living cells are capable of neutral red uptake via an active transport mechanism. For an exemplary workflow of a cytotoxicity assay, see FIG. 16.

[0091] Preferably, said activity is the capability of said myosin (i) to bind actin; (ii) to convert ATP into ADP and Pᵢ; and/or (iii) to generate force and/or movement. Exemplary or preferred binding assays are described herein above and can be applied for determining whether myosin binds actin, preferably F-actin, and/or nucleotides. Exemplary or preferred activity assays are described herein below and can be applied for determining whether myosin is capable of converting ATP into ADP and Pᵢ or of force production and generation of movement. An exemplary assay for ATPase activity is based on the detection of free phosphate formed upon cleavage of ATP, wherein the detection is effected using malachite green. For an exemplary workflow, see FIG. 17.

[0092] In preferred embodiments, molecular modeling according to the invention starts from a compound selected from compounds of the general formulae (1) to (4) or a salt or solvate thereof, or the test compound to be used in methods of identifying of the invention is selected from compounds of the general formulae (1) to (4) or a salt or solvate thereof

[chemical structure]

wherein X is selected from NH, O and S; and Y and Z designate, as valence permits, one or more substituents, wherein each occurrence of Y and Z is independently selected from F, Cl, Br, I, R and OR; R being selected from (i) H, (ii) (CO)CH₃, and (iii) linear or branched alkyl, alkenyl or alkinyl with one to four carbon atoms, the moieties (ii) and (iii) being optionally substituted with one or more F, Cl, Br and/or I.

[0093] Formula (1) represents carbazoles, dibenzofurans and dibenzothiophenes according to the invention. Formula (2) represents acridones according to the invention. Formula (3) represents a group of alkaloids known as pseudilines as well as their structural analogues having furan or thiophene in place of the pyrrole ring. Formula (4) represents quinolines according to the invention. The nitrogen-containing ring of quinolines according to the invention may be partially or fully hydrogenated.

[0094] Generally, in preferred embodiments of the present invention, R—as used in conjunction with any of the general formulae disclosed herein above and below—has one or two carbon atoms. Particularly preferred is R=CH₃, CCl₃ or CF₃. Also preferred are partially halogenated or mixed halogenated methyl groups such as CH₂F, CHF₂, CH₂Cl, CHCl₂, CF₂Cl or CHFCl.

[0095] Further preferred compounds are disclosed herein below in conjunction with medical uses. All compounds described in conjunction with medical uses, in particular classes of compounds represented by generic formulae, are deliberately envisaged for use in the methods according to the present invention.

[0096] Also provided is the use of a compound selected from compounds of the general formulae (1) to (4) or a salt or solvate thereof as a lead compound in the development of a modulator of a myosin.

[0097] The term “lead compound” is known in the art and refers to a compound providing a starting point for developing a pharmaceutically active agent. Generally, said pharmaceutically active agent is different from, preferably optimized as compared to the lead compound. In other words, the development of a lead compound preferably involves the optimization of the pharmacological properties of said lead compound.

[0098] Methods for the optimization of the pharmacological properties of compounds identified in screens, generally referred to as lead compounds, are known in the art and comprise a method of modifying a compound identified as a lead compound to achieve: (i) modified site of action, spectrum of activity, organ specificity, and/or (ii) improved potency, and/or (iii) decreased toxicity (improved therapeutic index), and/or (iv) decreased side effects, and/or (v) modified onset of therapeutic action, duration of effect, and/or (vi) modified pharmacokinetic parameters (resorption, distribution, metabolism and excretion), and/or (vii) modified physico-chemical parameters (solubility, hygroscopicity, color, taste, odor, stability, state), and/or (viii) improved general specificity, organ/tissue specificity, and/or (ix) optimized application form and route by (i) esterification of carboxyl groups, or (ii) esterification of hydroxyl groups with carboxylic acids, or (iii) esterification of hydroxyl groups to, e.g. phosphates, pyrophosphates or sulfates or hemi-succinates, or (iv) formation of pharmaceutically acceptable salts, or (v) formation of pharmaceutically acceptable complexes, or (vi) synthesis of pharmacologically active polymers, or (vii) introduction of hydrophilic moieties, or (viii) introduction/exchange of substituents on aromates or side chains, change of substituent pattern, or (ix) modification by introduction of isosteric or bioisosteric moieties, or (x) synthesis of homologous compounds, or (xi) introduction of branched side chains, or (xii) conversion of alkyl substituents to cyclic analogues, or (xiii) derivatisation of hydroxyl group to ketales, acetales, or (xiv) N-acetylation to amides, phenylcarbamates, or (xv) synthesis of Mannich bases, imines, or (xvi) transformation of ketones or aldehydes to Schiff's bases, oximes, acetates, ketales, enolesters, oxazolidines, thiazolidines or combinations thereof.

[0099] The various steps recited above are generally known in the art. They include or rely on quantitative structure-action relationship (QSAR) analyses (Kubinyi, “Hausch-Analysis and Related Approaches”, VCH Verlag, Weinheim, 1992), combinatorial biochemistry, classical chemistry and others (see, for example, Holzgrabe and Bechtold, Deutsche Apotheker Zeitung 140(8), 813-823, 2000).

[0100] Preferably, said general formulae are the general formulae (1) or (2).

[0101] In a further preferred embodiment, said modulator is an inhibitor.

[0102] The term “inhibitor” refers to compounds lowering or abolishing the activity of myosin, whereas the term “activator” refers to compounds increasing the activity of myosin, said activity being defined herein above. In preferred embodiments, inhibition refers to a reduction in activity of at least 10, 20, 30, 40, 50, 60, 70, 80, 90, 95, 98 or 99%. More preferred, activity drops to less than 10⁻², less than 10⁻³, less than 10⁻⁴ or less than 10⁻⁵ times the activity in absence of the inhibitor. “Activation” preferably refers to an increase in activity by 10, 20, 50 or 100%. More preferred activation involves a rise in activity to 3-fold, 5-fold, 10-fold or 15-fold or more of the activity in absence of the activator.

[0103] The present invention furthermore provides a pharmaceutical composition comprising one or more compounds selected from compounds of the general formulae (1), (2) and (4) as defined herein above; 2,3,4-tribromo-5-(1′-methoxy-2′,4′-difluoro-phenyl)-pyrrole; and the compounds shown below, wherein CF₃ may replace one, more or all occurrences of F, Cl, Br and/or MeO in said compounds shown below:

[chemical structure]

or a salt or solvate thereof.

[0104] The pharmaceutical composition may further comprise pharmaceutically acceptable carriers, excipients and/or diluents. Examples of suitable pharmaceutical carriers, excipients and/or diluents are well known in the art and include phosphate buffered saline solutions, water, emulsions, such as oil/water emulsions, various types of wetting agents, sterile solutions etc. Compositions comprising such carriers can be formulated by well known conventional methods. These pharmaceutical compositions can be administered to the subject at a suitable dose. Administration of the suitable compositions may be effected by different ways, e.g., by intravenous, intraperitoneal, subcutaneous, intramuscular, topical, intradermal, intranasal or intrabronchial administration. It is particularly preferred that said administration is carried out by injection and/or delivery, e.g., to a site in the pancreas or into a brain artery or directly into brain tissue. The compositions may also be administered directly to the target site, e.g., by biolistic delivery to an external or internal target site, like the pancreas or brain. The dosage regimen will be determined by the attending physician and clinical factors. As is well known in the medical arts, dosages for any one patient depends upon many factors, including the patient's size, body surface area, age, the particular compound to be administered, sex, time and route of administration, general health, and other drugs being administered concurrently. Pharmaceutically active matter may be present in amounts between 1 ng and 10 mg/kg body weight per dose; however, doses below or above this exemplary range are envisioned, especially considering the aforementioned factors. If the regimen is a continuous infusion, it is preferably in the range of 1 μg to 10 mg units per kilogram of body weight per minute.

[0105] Also provided is the use of one or more compounds as defined above for the manufacture a pharmaceutical composition for the treatment and/or prevention of cardiovascular diseases, cancer, diseases of the central nervous system, viral infections, and infections by parasites of the Apicomplexa family.

[0106] Example 2 provides proof of in vitro and in vivo activity of several preferred or exemplary compounds of the invention.

[0107] Myosins play an essential role in force generating processes and are essential in several common diseases like cancer, cardiovascular diseases, and parasite and viral infections. Also the immune response during inflammation, which is triggered by the synapse between T cells and antigen presenting cells, depends on the activation of myosin-2 and myosin-5 and is up-regulated during T-cell activation (Rey et al., 2007, in press).

[0108] With respect to cancer, in particular the formation of metastasis severely complicates the therapy and negatively affects the prognosis. At the beginning of tumor metastasis cells may enter into an amoeboid migratory state. For the migration, non-muscle myosins-2A and 2B play an essential role (Betapudi et al., 2006). The inhibition of myosin-2 (in particular isoform A) was shown to strongly inhibit tumor cell migration. Furthermore, in a clinical study on lung cancer patients a positive correlation was found between the expression of a myosin acitivating enzyme (myosin light chain kinase) and the likelihood of disease recurrence and metastasis (Minamiya et al., 2005). These and additional observations give strong evidence that the myosin-2 isoforms are excellent target proteins for cancer treatment, in particular against tumors that may form metastasis. This holds true in particular for the prevalent cancer types with high incidence (U.S. cancer statistics from 2003) like cancer of the oral cavity and pharynx, the digestive system including pancreas and respiratory system, melanomas of the skin, the genital and urinary system, and cancer of the brain and the nervous system. Further cancer forms which are deliberately envisaged for treatment by the present invention are listed below.

[0109] The myosin isoform 2B was found to be important for lamellar protrusions of migrating cells. Cellular protrusions such as filopodia are known to provide a gateway for the entry of various viruses into a host cell. Myosin-2 (Lehmann et al., 2005) or myosin-6 (Sun and Whittaker, 2007) are indispensable for virus uptake. After multiplication the exit of virus particles from the infected cell again depend on Myosin-2A or B; examples are vaccinia virus (M. Way, London; personal communication to HOG) and herpes simplex virus (van Leeuwen, 2002)). Myosin-2A is furthermore required for the internalization of the CXCR4 receptor, which plays a role in HIV uptake into the cell. The uptake of the receptor can be inhibited by silencing nonmuscle myosin-2A with siRNA or using the myosin inhibitor blebbistatin (Rey et al, 2007). Furthermore, the release of HIV-1 from the host cell depends on myosin activity, since this process can be blocked with Wortmannin, an effective inhibitor of myosin light chain kinase (Sasaki et al., 1995). Based on these findings the inhibition of myosin activity is envisaged as an efficient treatment of viral infections. The fact that myosin plays a key role in viral spreading is reflected in the observation that even plant viruses (Tobacco mosaic virus, Kawakami et al., 2004) require myosin activity for spreading.

[0110] Members of the myosin superfamily are known to be involved in the host cell invasion of apicomplexan parasites. This group of protozoa includes species which are the cause of various human diseases of which malaria, toxoplasmosis or Eimeria infections are prominent examples. The gliding motility and invasion during infection depends on the activity of the unusual class-14, 23, and 24 myosins which is found in all Apicomplexa (Soldati et al., 2004).

[0111] Class-5 myosins are very abundant in the CNS (central nervous system) and mutations in the encoding gene give rise to severe neurological defects in mice and humans. In neurons, myosin-5a controls the targeting of IP3 (inositol 1,4,5-trisphosphate)-sensitive Ca²⁺ stores to dendritic spines and the transport of mRNAs (Desnos et. al., 2007). Whereas deletion of non-muscle myosins-2 A and B are accompanied by abnormalities in the brain and a defect in the migration of neuronal cells (facial neurons, cerebellar granule cell and pontine neurons (Kim et. al., 2005).

[0112] In a more preferred embodiment, said infection by parasites of Apicomplexa family is selected from malaria, toxoplasmosis and coccidiosis (e.g. by Eimeria).

[0113] In a more preferred embodiment, said cancer is selected from the group consisting of:

Anal Cancer (Squamous Cell Carcinoma of the Anus), Bladder Cancer (Squamous Cell Carcinoma of the Bladder), Bone Cancer (Chondrosarcoma of Cartilage), Osteosarcoma, Cancer of the bone marrow including Myelodysplastic syndrome (MDS), Acute Lymphoblastic Leukaemia (ALL), Promyelocytic Leukaemia (PML), Acute Myeloid Leukaemia (AML), Chronic Myeloid Leukaemia (CML), Chronic Lymphacytic Leukaemia (CLL), Multiple Myeloma, Brain Tumour including as Astrocytoma, Glioblastoma, Lymphoma of the Brain, Neuroblastoma, Breast Cancer including including Ductal Carcinoma of the Breast (DCIS) and Lobular Carcinoma of the Breast (LCIS), Bowel Cancer, Cervical Cancer, Colorectal Cancer including Adenocarcinoma of the Rectum and of the Colon, Head and Neck Cancer including Lymphoma of the Tonsil, Squamous Cell Carcinoma of the Floor of the Mouth (Oral Cancer), Squamous Cell Carcinoma of the Larynx, Pharynx, Tongue, and Squamous Cell Carcinoma of the Tonsil (Throat cancer), Kidney Cancer (Renal Cell Carcinoma), Liver Cancer (Hepatocellular Carcinoma), Lung Cancer including Malignant Mesothelioma of the Pleura (Malignant Mesothelioma), Adenocarcinoma of the Lung, Large Cell Carcinoma of the Lung, Non-small cell lung cancer (NSCLC), Small Cell Carcinoma of the Lung, Pleural effusion, Cancer of the Lymphatic System Hodgkin's lymphoma and non-Hodgkin's lymphoma including Anaplastic Large Cell Lymphoma (ALCL), Burkitt's lymphoma, Cerebral Lymphoma, Cutaneous T cell Lymphoma, Diffuse large B cell lymphoma (DLBCL), Muscle Cancer including Biliary Cancer (Cholangiocarcinoma), Leiomyosarcoma of Muscle, Rhabdomyosarcoma of Muscle, Soft tissue Sarcomas, Oesophagus Cancer, Ovarian Cancer, Pancreatic Cancer (Adenocarcinoma of the Pancreas), Pituitary gland Gland Cancer, Prostate Cancer including Neuroendocrine Carcinoma, Adenocarcinoma of the Prostate, Skin Cancer including Basal Cell Carcinoma of the Skin, Malignant Skin Melanoma, Small Intestine Cancer including Small Bowel cancer, Spinal Cord Tumours including Lymphoma, Astrocytoma, Glioma, Meningioma, and Metastases of the Spinal Cord, Stomach cancer, Testicular Cancer including Seminoma and Teratoma of the Testicle, Thyroid Cancer, Uterus Cancer (Adenocarcinoma of the Endometrium), Squamous Cell Carcinoma of the Vulva.

[0114] Viral infections according to the invention include infection by double-stranded DNA viruses such as viruses of Herpesviridae family include Herpes Simplex Virus (HSV). Furthermore deliberately envisaged are lentiviral and retroviral infections, including HIV infection (AIDS), Hepatitis-A, HBV (hepatitis-B) and HCV (hepatitis-C) infections.

[0115] Preferred diseases of the central nervous system (CNS) include:

Alzheimer Disease, Brain Ischemia, Cerebellar Ataxia, Cerebrovascular Accident, Corticobasal Ganglionic Degeneration (CBGD), Creutzfeldt-Jakob Syndrome, Dandy-Walker Syndrome, Dementia, Vascular, Encephalitis, Encephalomyelitis, Epilepsy, Hallervorden-Spatz Syndrome, Huntington Disease, Hydrocephalus, Ischemic Attack, Lacunar Syndromes, Landau-Kleffner Syndrome, Lewy Body Disease, Machado-Joseph Disease, Meige Syndrome, Meningitis, Multiple System Atrophy, Neuroaxonal Dystrophies, Parkinsonian Disorders, Shy-Drager Syndrome, Spinocerebellar Ataxias, Spinocerebellar Degenerations and Tourette Syndrome.

[0116] The present invention furthermore provides a compound of the following formula A-L-B, wherein A is selected from compounds of the general formulae (1) to (4) as defined above, L is a linker, B is blebbistatin or an analogue, and “—” is a covalent bond.

[0117] This embodiment provides divalent or multivalent compounds binding simultaneously to two or more binding sites of myosin. Such simultaneous binding to two or more binding sites may significantly enhance affinity and/or specificity. Blebbistatin as such has been described in the prior art; see e.g. Kovacs et al. (loc. cit.). Analogues of blebbistatin according to the invention are compounds binding to the blebbistatin binding pocket of myosins and/or exerting substantially the same modulating effect as blebbistatin. Blebbistatin interferes with myosin-2 function by inhibiting ATPase activity by blocking entry into the strong binding state, additionally it reduces the rate of ADP release. Preferred compounds A are carbazoles according to the invention (formulae (2) and (2′)). A preferred attachment site for the linker L on carbazoles according to the invention is the position Y₆. The linker L may be the substituent designated Y₆. Preferably the linker is a poly-methylene linker with four to eight, more preferred five to seven, most preferred six carbon atoms, i.e., —(CH₂)₆—. One or more CH₂ groups of said linker may be replaced with oxygen or sulphur. Accordingly, envisaged linkers include —O—(CH₂)₂—O—(CH₂)₂—. Further linkers are known in the art and can be used for the present invention, wherein it is preferred that the length of said linkers is the same or substantially the same as the length of a poly-methylene linker with four to eight, more preferred five to seven, most preferred six carbon atoms.

[0118] In preferred embodiments of the pharmaceutical composition, the use, or the compound of the formula A-L- Blebbistatin according to the invention, said one or more compounds or said compound A, respectively, are selected from compounds of the formulae (1′), (2′) and (3′):

[chemical structure]

wherein Y₁, Y₂, Y₃, Y₄, Y₅, Y₆, and Y₇ are independently selected from H, F, Cl, Br, I, R and OR; R being selected from (i) H, (ii) (CO)CH₃, and (iii) linear or branched alkyl, alkenyl or alkinyl with one to four carbon atoms, optionally substituted with one or more F, Cl, Br and/or I; or a salt or solvate thereof.

[0119] Preferably, Y₁ to Y₇, to the extent they are not H, are selected from Cl, Br, OCH₃ and CF₃. Particularly preferred are Br and CF₃.

[0120] In more preferred embodiments, (i) Y₁, Y₄ and Y₆ of formula (1′) are H; and/or (ii) Y₁, Y₄, Y₅ and Y₇ of formula (2′) are H.

[0121] In yet more preferred embodiments, furthermore (i) Y₇ of formula (1′) is H; and/or (ii) Y₂ of formula (2′) is H.

[0122] Accordingly, more preferred carbazoles include

[chemical structure]

[0123] More preferred acridones include

[chemical structure]

[0124] The preferred substitution patterns as defined in the preceding embodiments apply mutatis mutandis O- and S-analoga of the compounds of formulae (1′), and (3′), i.e., to the corresponding dibenzo-furans and dibenzo-thiophenes (O- and S-analoga of the compounds of formulae (1′)), as well as to the corresponding phenyl-furans and phenyl-thiophenes (O- and S-analoga of the compounds of formulae (3′)). Also these O- and S-analogs are embraced by the present invention. Accordingly, a preferred dibenzo-furan is

[chemical structure]

[0125] It is furthermore preferred that the substituents Y₁ to Y₇ on carbazoles, dibenzo-furans, dibenzo-thiophenes and acridones according to the invention, to the extent said substituents are present, i.e., different from H, are equal. Also, it is preferred that substituents Y₁, Y₂ and Y₃ of pseudilines, phenyl-furans and phenyl-thiophenes of the invention are equal. Furthermore, and independently, it is preferred that substituents Y₄ and Y₅ of said pseudilines, phenyl-furans and phenyl-thiophenes are equal. Preferably, said substituents which are equal are all Cl, Br, OCH₃ (herein also abbreviated “MeO”) or CF₃, respectively. Particularly preferred are Br and CF₃.

[0126] Further compounds of the invention are phenols which are substituted in positions 2, 4 and 6. Preferably, the substituents are selected from Br and CF₃. A preferred phenol according to the invention is 2,4,6-tribromo-phenol.

[0127] A further class of compounds according to the invention are fluorenes. Preferred fluorenes include 1-amino-9-hydroxy-fluorenes and 2-amino-9-hydroxy-fluorenes, which are optionally substituted, as valence permits, with one or more substituents selected from F, Cl, Br, I, R and OR; R being selected from (i) H, (ii) (CO)CH₃, and (iii) linear or branched alkyl, alkenyl or alkinyl with one to four carbon atoms, optionally substituted with one or more F, Cl, Br and/or I. A preferred fluorene according to the invention is 2-amino-3-bromo-9-hydroxy-fluorene.

[0128] Further preferred or exemplary compounds are shown below. These compounds—as are all compounds described herein—are inter alia envisaged as starting compounds far the method of designing according to the invention and as lead compounds which may be further optimized by using the lead optimization methods as described herein above. The “HET” series of compounds is herein also referred to as the “KIN” series of compounds. Accordingly, and as an example, “HET-43” and “KIN-43” designate the same compound.

[chemical structure]

[chemical structure]

[0129] HET-43 is also known as pentabromopseudilin (PBP).

[0130] The present invention furthermore provides a method of treating a disease selected from the group consisting of cardiovascular diseases, cancer, diseases of the central nervous system, viral infections, and infections by parasites of the Apicomplexa family, the method comprising administering to the subject in need thereof a therapeutically effective amount of one or more compounds as defined herein above.

[0131] Another embodiment of the invention is a method of treating a patient suffering from or at risk of developing a disease or condition selected from the group consisting of cardiovascular diseases, cancer, diseases of the central nervous system, viral infections, and infections by parasites of the Apicomplexa family, the method comprising administering to the patient a composition comprising one or more of the compounds defined above in a therapeutically effective dose, thereby treating the patient.

[0132] Preferred compounds and preferred indications to be treated or prevented by the above methods are described herein above in conjunction with medical uses and pharmaceutical compositions according to the invention.

[0133] The Figures show:

[0134] FIG. 1: Topology of myosin-2. Helices are shown as circles and beta-sheets as triangles.

[0135] FIG. 2: Sequence alignment of three representative myosins (Dictyostelium myosin-1E, Dictyostelium myosin-2 and Gallus gallus myosin-5). The ligand-binding sites are shaded. Dd=Dictyostefium discoideum, Gg=Gallus genus.

[0136] FIG. 3: Alignment of human myosin-2 isoforms. The isoforms are human myosins-2 from cardiac muscle, smooth muscle, non-muscle (NM) and brain tissue. The ligand-binding sites of the respective human myosins NM Myosin-MHC14, brain tissue-MHC15, cardiac alpha-MHC6, cardiac beta-MHC7, fast skeletal adult2-MHC2, fast skeletal embryonal-MHC3, skeletal adult1-MHC1, skeletal extraocular-MHC13, smooth muscle-MHC11, NM 2A-MHC9, NM 2B-MHC10 as compared to Dictyostelium myosin-2 (“MHCA Fulllength”) and MHC myosin heavy chain are shaded.

[0137] FIG. 4: Alignment of human and apicomplexan myosins. The ligand-binding sites of the respective human myosins cardiac beta-MHC7, fast skeletal adult2-MHC2, smooth muscle-MHC11, NM 2A-MHC9, NM 2B-MHC10 as compared to myosins-1 from Plasmodium falciparum (Pf MyoA und Pf MyoF), and from Toxoplasma gondii (Tg MYo A, Tg Myo B, Tg Myo E and Tg MyoG) are shaded. MHC=myosin heavy chain.

[0138] FIG. 5: Amino acid sequence pair distance of myosins from human, Apicomplexa and Dictyostelium. The underlying sequences are the sequence from amino acid 265 to 635 of Dd myosin and the corresponding subsequences of the other myosins aligning with this sequence.

[0139] FIG. 6: Histogram showing the relative myosin-2 ATPase activity measured in the absence (+control) and presence of halogenated alkaloids. Blebbistatin und BTS were used as controls. Compounds of the HET-series, BTS and blebbistatin were used at 25 μM final concentration. HET-43 is PBP (pentabromopseudilin). HET-68=pentachloropseudilin; Het-70=2,3,4-tribromo-5 (1′ hydroxy, 2′,4′-dichlorophenyl)pyrrole; Het-74=2,3,4-tribromo-5 (1′ hydroxy, 2′,4′-difluorophenyl)pyrrole; HET-76=2,3,4-triiodo-5 (1′ methoxy, 2′,4′-dichlorophenyl)pyrrole; HET-78=2,3,4-tribromo-5 (1′ methoxy, 2′,4′-diiodophenyl)pyrrole. The bars represent the mean value of three measurements. The error bars indicate the standard deviation.

[0140] FIG. 7: 2 Fo-Fc electron density omit map showing Het-43 (left) and the nucleotide (right) binding sites. The map was calculated using the final model of myosin-2(Het-43) complex with the inhibitor and the substrate omitted. The map was contoured at 1.0 σ.

[0141] Overall view of myosin(Het-43) complex (left). The details of Het-43 positioning in the binding site are shown in the close up (right). The transparent surface represents van-der-waals radii of the atoms forming Het-43 binding site.

[0142] FIG. 8: Comparison of the PBP-binding sites of Dictyostelium myosin-2, Dictyostelium myosin-1E, chicken myosin-5a, Saccharomyces cerevisiae myosin-2p, and Dictyostelium discoideum myosin-5b (from top to bottom).

[0143] FIG. 9: Inhibition of myosin functions by PBP. (a) Concentration-dependence of the inhibition of the actin-activated ATPase activity displayed by different myosin constructs. The semi-logarithmic plot shows the concentration dependence for myosin-1E (σ), myosin-2 (▪), and myosin-5b (Δ) from D. discoideum and for chicken myosin-5a (▾). (b) ATP turn-over rates of Dictyostelium myosin-2 (◯) and Dictyostelium myosin-5b (▪) at increasing F-actin concentrations in the absence (filled symbols) and presence (open symbols) of 25 μM pentabromopseudilin.

[0144] FIG. 10: ATP binding kinetics. For details see Example 2.

[0145] FIG. 11: (a) The histograms shows the average sliding velocity of Rh/Ph-labeled actin filaments in the absence and presence of 10 μM PBP. (b) Inhibition of chicken myosin-5a by PBP in the in vitro motility assay. The histograms show the average sliding velocity of Rh/Ph-labeled actin filaments in the absence and presence of 10 μM PBP. Myosin-5a moves actin filaments with an average velocity of 0.6 μm/s±0.05 (dark bars); addition of 10 μM PBP into the same flow cell decreases the average sliding velocity to 0.013 μm/s±0.002 (light grey bars).

[0146] FIG. 12: Isometric force measurements.

[0147] FIG. 13: Myo2p-dependent changes in mitochondrial morphology. In yeast cells, the class-5 myosins Myo2p is responsible for the distribution of mitochondria between mother and daughter cells during cytokinesis and has be shown to affect mitochondrial morphology during interface. (a) Wild-type yeast cells; (b) Myo2p-depleted cells; (a) the phenotype of Myo2p-depleted cells can be phenocopied by exposure of wild-type cells to 500 nM PBP. Insets show the same cells viewed under transmitted light. Bar: 5 μm

[0148] FIG. 14(A): Overview of HET-79 binding site. Het-79 binds bind in the same region and makes similar contacts as HET-43. However, there exist significant differences in the detailed interactions, the size of the contact area with the protein and the accessibility of the binding pocket.

[0149] FIG. 14(B): HET-79 binding pocket has three access channels. HET-79 binds in a pocket that is formed by residues at the interface between the 50 kDa upper domain (U50) and the 50 kDa lower domain (L50). The secondary structure elements that form the pocket include helix-13 (K265-V268), helix-21 (V411-L441), the strut loop (N588-Q593), loop 2 (D614-T629) and helix-29 (V630-E646). Both polar and apolar residues contribute to the binding of PBP. The HET-79 pocket has three major access channels. The first is located between loop-2 and the strut loop, the second is formed by residues from the loop connecting β7, the edge β-strand of the central β-sheet, with helix-13, helix-21, loop-2 and helix-29. The third is formed by residues from β7, helix-13, the loop connecting both, helix-21, and the strut loop.

[0150] FIG. 14(C): Detailed contacts with the OH-group of the carbazol derivative HET-79. K265 forms a hydrogen bond with the hydroxyl group. Additionally, K265 is in hydrogen bonding distance from a water molecule that is also in contact with D590. K423 and the carbonyl group of A424 form additional contacts with the OH-group of HET-79.

[0151] FIG. 14(D): Comparison with HET-43 Binding pocket.

[0152] FIG. 15(A): Het-68 (Pentachloropseudilin) binding shows major differences to that of the closely related pentabromopseudilin. Differences include major rearrangements of the loop-2 region, a reversal of the orientation of the inhibitor in the binding pocket, the complete planarity of HET-68, and its trans orientation of phenyl and pyrrol rings. Accordingly, there are also major changes in the contacts made between inhibitor and protein. K265 makes electrostatic interactions with the chlorine groups at positions 2 and 3 of the pyrrol ring; the chlorine in position 4 makes electrostatic interactions with D590. R428 forms a hydrogen bond with the OH group of the phenyl ring and the aliphatic part makes staggering interactions with pyrrol and phenyl ring. The aliphatic part of R620 makes a staggering interaction with the phenyl ring and its guanidinium group contributes an electrostatic interaction with the OH group. A618 and R620 form a tight indentation of the binding pocket that accommodates the 4′ chlorine, where the 4′ chlorine makes strong electrostatic interactions with the main chain amide groups of S619 and R620. Finally, E597 forms a hydrogen bond with a water molecule that is positioned close to the 2′ chlorine group of the phenyl ring.

[0153] FIG. 15(B): Overview of the Het-68 binding pocket. The second helix of the helix-loop-helix motif preceding loop-2 appears unstructured here and has moved closer towards the inhibitor. The inhibitor is completely planar and the binding pocket is more open towards the central β-sheet. The nucleotide binding pocket is seen in the lower-left corner.

[0154] FIG. 16: Cytotoxicity assay.

[0155] FIG. 17: ATPase activity assay.

[0156] FIG. 18: KIN-68-inhibition of the basal ATPase activity of Dictyostelium myosin-1E and myosin-5b. The concentrations of KIN-68 required for half-maximal inhibition of myosin-1E ATPase activity is 55.8 μM (a) and 104.6 μM for myosin-5b (b).

[0157] FIG. 19: Effects of KIN-74 and KIN-77 on the basal and actin-activated ATPase activity of Dictyostelium myosin-2 and rabbit myosin-2.

[0158] (a) Concentrations of KIN-7 in the range from 1 to 50 μM activate the basal ATPase activity of Dictyostelium myosin-2 with an apparent half maximum activation constant AC50 of 18 μM. At concentrations of KIN-74>50 μM the basal ATPase activity of Dictyostelium myosin-2 is inhibited with IC50=90 μM.

[0159] (b) In the presence of 30 μM actin KIN-74 inhibits the ATPase activity of Dictyostelium myosin-2 with IC50=88.8 μM

[0160] (c) KIN-77 inhibits the basal ATPase activity of myosin-2 approximately 3-fold with IC50=5.3 μM.

[0161] (d) Concentrations of KIN-77 in the range from 1 to 100 μM activate the basal ATPase activity of rabbit myosin-2 from 6.1 s-1 to 8.5 s-1 with a half maximum activation constant AC50=19.2 μM. At concentrations of KIN-77>100 μM the actin-activated ATPase activity of rabbit myosin-2 is inhibited 3.5-fold with an IC50=95.6 μM.

[0162] FIG. 20: (a) Plasmodium sporozoites adopt motility states, shown in the photos from the left to the right, attached, waving, clockwise (CW), and counterclockwise (CCW). In the absence of inhibitors sporozoites preferably move CW and CCW at 0.97 μm/s and 1.13 μm/s. (b) The addition of KIN-93 switched the population to attached and waving states and reduced the velocity for CW and CCW motility to 0.58 μm/s and 0.59 μm/s.

[0163] FIG. 21: Development toxicity testing of KIN-compounds on medaka embryos. (a) KIN-43 in concentrations between 0.5 μM and 100 μM were incubated for 48 h with 20 medaka embryos per concentration. The half lethal concentration of KIN-43 was at LC50=3.0 μM. (b) Light microscopy image of embryo after 48 h in the absence of KIN-43. (c) At higher concentration of KIN-43 the embryos agglomerate and die. (d) KIN-93 shows no lethal effect on medaka embryos in the lower micromolar range below 50.0 μM. LC50 is therefore well above a concentration of 50.0 μM.

[0164] FIG. 22: Cytotoxic testing of KIN-compounds by neutral red uptake assays. (a) human hepatocyte carcinoma cells (Hep G2) were exposed to KIN-43 for 4 h in the in presence of 1% FBS. KIN-43 shows a half effective concentration EC50 of 0.03 μM. (b) exposure of the same amount of KIN-93 did not show a measurable effect in the concentration range between 0.1 nM and 100 μM resulting in a LC50 well above a concentration of 50.0 μM.

[0165] The following examples illustrate the invention but should not be construed as being limiting.

### EXAMPLE 1

### Metal-Catalyzed Syntheses of Polyheterocyclic Compounds

### Introduction

[0166] Over the past two decades, applications of transition metals for selective C—H bond activation have emerged to a powerful tool in organic synthesis.

[0167] Methodologies have been developed for the cyclization of appropriately substituted primary or secondary alkyl- and arylamines, which open up simple and direct approaches to nitrogen-containing heterocyclic ring systems. These transformations are efficiently induced by using either stoichiometric or even catalytic amounts of transition metals (e.g., iron, molybdenum, palladium, or silver). The advantages of this synthetic approach are mild reaction conditions and toleration of a broad range of functional groups. Therefore, the construction of nitrogen-containing heterocyclic frameworks by fusion of fully functionalized building blocks is achieved in just a few synthetic steps. Application of this chemistry in heterocyclic synthesis provides convergent and highly efficient short-step approaches to a variety of biologically active compounds.¹

### 1. Silver(I)-Catalyzed Cyclization to Pyrroles

[0168] The pyrrole ring system represents a pivotal substructure in naturally occurring alkaloids and pharmaceutical products. Following the classical Hantzsch, Knorr, and Paal-Knorr syntheses numerous alternative assemblies of pyrroles have been reported. Homopropargylamines represent easily available building blocks for pyrrole synthesis. We recently described a novel pyrrole synthesis by silver(I)-mediated oxidative cyclization of homopropargylamines to pyrroles.² The required precursors are readily accessible by condensation of simple arylaldehydes to Schiff bases and subsequent Lewis acid-promoted addition of 3-trimethyl-silylpropargylmagnesium bromide (Scheme 1). Under optimized reaction conditions, treatment with 1.1 equivalents of silver acetate at room temperature affords the corresponding pyrroles almost quantitatively. This procedure represents a versatile and simple synthetic route to 1,2-diarylpyrroles, which are of interest due to their biological activities.

[chemical structure]

[0169] It is known that silver(I) salts form stable π-complexes with terminal acetylenes. On the other hand, silylacetylenes on treatment with silver nitrate were reported to afford silver acetylides. Based on these considerations and additional experimental evidence,² the following mechanistic rationale has been provided for the silver(I)-mediated oxidative cyclization of homopropargylamines to pyrroles (Scheme 2). Activation of the acetylene by coordination of the triple bond to the silver cation enables a 5-endo-dig cyclization via nucleophilic attack of the amine. Protonation of the resulting vinyl silver complex leads to an iminium ion. Subsequent β-hydride elimination affords metallic silver and a pyrrylium ion which aromatizes by proton loss to the pyrrole. For trimethylsilyl-substituted homopropargylamines (R³=SiMe₃), the resulting pyrrole (R³=SiMe₃) undergoes protodesilylation to the 1,2-disubstituted pyrrole.

[chemical structure]

### Application: Synthesis of Pentabromopseudilin and Structural Analogues

[0170] Highly halogenated bioactive natural products as pentabromo- and pentachloropseudilin are often obtained from marine sources.³ For the construction of their heterocyclic framework a catalytic variant of our silver(I)-mediated pyrrole synthesis was applied: a silver(I)-catalyzed cyclization of the corresponding N-tosylhomopropargylamines (Scheme 3).

[chemical structure]

[0171] Starting from the appropriately substituted precursor, the dichloro- and the difluoro-O-methylpseudilin are available (Scheme 4). Further chlorination and subsequent cleavage of the ether provides pentachloropseudilin, while further bromination followed by ether cleavage leads to the non-natural dichlorotribromopseudilin and difluorotribromopseudilin. Our direct approach can be easily exploited for the generation of a whole series of structural analogues.

[chemical structure]

### 2. Transition Metal-Catalyzed Oxidative Cyclization to Carbazoles

[0172] A broad structural variety of carbazole alkaloids with useful biological activities has been isolated from different natural sources (Chinese and Indian medicinal plants, marine algae, streptomyces, etc.). The pharmacological potential of this class of natural products led to the development of diverse methodologies for the synthesis of carbazoles.⁴ We elaborated an efficient iron-mediated construction of the carbazole framework by consecutive C—C and C—N bond formation (Scheme 5). Electrophilic aromatic substitution by reaction of the iron-coordinated cyclohexadienylium salt 1 and the arylamine 2 generates the aryl-substituted iron-cyclohexadiene complex 3. Application of an appropriate oxidizing agent results in oxidative cyclization with concomitant aromatization and demetalation to afford directly the carbazole 4.

[chemical structure]

[0173] An alternative route to the carbazole framework represents the palladium(II)-catalyzed oxidative cyclization of N,N-diarylamines 6, which are readily available by palladium(0)-catalyzed amination of the aryl bromides 5 with the arylamines 2. Heating of the N,N-diarylamines 6 with catalytic amounts of palladium(II) acetate in the presence of copper(II) acetate in acetic acid at reflux results in smooth oxidative cyclization to the corresponding carbazoles 4 (Scheme 5).⁴

### Application: Synthesis of Polybrominated 1-Hydroxycarbazoles

[0174] Using the palladium-catalyzed construction of the carbazole framework, an easy access to 1-methoxycarbazole has been achieved (Scheme 6). Dependent on the reagent and the reaction conditions, the subsequent bromination provides either 3,4,6-tribromo-1-methoxycarbazole or 3,4,6,8-tetrabromo-1-methoxycarbazole, which by cleavage of the ether are converted to the corresponding polybrominated 1-hydroxycarbazoles.

[chemical structure]

### EXAMPLE 2

### Allosteric Inhibition of Myosin Motor Activity by Pentabromopseudilin

[0175] The inventors surprisingly found several promising lead compounds; amongst them flavinoids and halogenated alkaloids; see FIG. 6. Furthermore, it was surprisingly found that pentabromopseudilin (PBP) was a very potent inhibitor of rabbit skeletal muscle heavy meromyosin (HMM) ATPase activity. The systematic name of PBP is 2,3,4-tribromo-5-(1′ hydroxy, 2′,4′-dibromophenyl)-pyrrole.

[0176] To identify the PBP binding site and to elucidate the inhibitory mechanism, we solved the cocrystal structure of PBP bound to the Dictyostelium myosin-2 motor domain. The structure shows the inhibitor to bind in a pocket close to the actin binding region at the tip of the 50-kDa domain. Based on the structure, we modeled the binding of PBP to Dictyostelium myosin-1E and chicken myosin-5a. Functional assays confirmed the predictions from the modeling that PBP is most potent as an inhibitor of class-5 myosins, less active for class-2 myosins, and displays weaker activity with class-1 myosins.

### Identification of the PBP-Binding Site

[0177] To identify the binding mode of PBP, we crystallized the Dictyostelium myosin-2 motor domain MgATP-metavanadate complex in the presence and absence of PBP. We solved the complex structures by molecular replacement and refined them to 2.1 Å and 2.8 Å resolution, respectively. The overall fold of the motor domain in both structures is similar to that reported for the pre-powerstroke conformation. The α-carbon atoms in both structures superimpose with an r.m.s. deviation of 0.695. The electron density for PBP is unambiguous and shows the inhibitor in a conformation where the phenyl and pyrrole ring systems are bent by 12° out of plane and twisted by 20° against each other (FIG. 7). The inhibitor binds in a pocket that is formed by residues at the interphase between the 50 kDa upper domain (U50) and the 50 kDa lower domain (L50). The secondary structure elements that form the pocket include helix-13 (K265-V268), helix-21 (V411-L441), the strut loop (N588-Q593), loop 2 (D614-T629) and helix-29 (V630-E646). Both polar and apolar residues contribute to the binding of PBP. The pocket has a large opening that is surrounded by residues from loop-2, helix-29, the loop connecting β7, the edge β-strand of the central β-sheet, with helix-13, and helix-21. Additionally, a smaller access channel is located between loop-2 and the strut loop. The total protein surface area in contact with PBP comprises 255 Å².

[0178] Coordinates for the myosin-2 motor domain—ADP.VO₃ and myosin-2 motor domain—ADP.VO₃—PBP complexes have been deposited in the Protein Data Bank (PDB) with the accession codes 2JJ9 and 2JHR, respectively.

[0179] Binding of PBP requires several rearrangements of residues inside and near the binding pocket. The most extensive of these changes involve residue K265. To allow PBP to bind, the ammonium group of K265 needs to move 3.4 Å towards K423. The movement of K265 involves a change in rotamer and the stabilization of the side chain in its new position by an intricate network of interactions (FIG. 8). These include the formation of a key hydrogen bond with the hydroxyl group of the PBP phenol ring, a second hydrogen bond that is mediated via a water molecule from the ammonium group of K265 to the 2′-bromo group of phenyl ring, and contacts with the NH-group and the 2-bromo group of the pyrrol ring. Further stabilization is derived from a salt-bridge that forms between the ammonium group of K265 and the carboxyl group of D590. Formation of this salt-bridge requires a shift in the Cα-backbone at position D590. The side chains of A424, R428, and D590 and the main chain carbonyl of A420 and A618 are involved in the binding of the phenyl-ring, whereas the pyrrol ring has additional interactions with the side chain of L431 and the main chain carbonyl of I617. The carbonyl groups of I617 and A618 are in hydrogen-bonding distance to the bromo substituents in positions 3 and 4′, while the hydrogen bond between the carbonyl group of A420 and the 2′-bromo group is mediated by the same water molecule as the hydrogen bond between K265 and the hydroxyl group. The extent of side chain rearrangements associated with these interactions varies from 0.8 Å for L431 to 3.5 Å for R428. Residues R620 and Q633 are not in contact with PBP but their side chains undergo coordinated conformational changes, bringing them in positions were they form part of the large opening of the pocket. The guanidinium group moves 3.5 Å due to a 90° rotation around the Cδ-Cε bond, while a rotation around the Cα-Cβ bond leads to a 1.5 Å shift in the position of the side chain of Q633.

### Specificity for Myosin Isoforms

[0180] Based on the structure of the myosin-2 motor domain with bound PBP, we performed molecular modeling studies to elucidate the specificity of PBP-binding to myosins from different classes. Here, we show the results for the modeling of complexes formed with class-1 and class-5 myosins, representing isoforms that are predicted to interact considerably stronger and weaker with the inhibitor (FIG. 8). The interaction between the lysine residue corresponding to K265 in myosin-2 is conserved in the other myosins. However, the number of interactions and their strength varies considerably between individual myosins. Myosin-1E is predicted to form only three hydrogen bonds and three weaker interactions, whereas myosin-5a is predicted to form twice as many interactions. To test the predictions from the modeling studies, we determined actin-activated ATPase activities in the presence of 0 to 150 μM PBP with rabbit skeletal myosin-2 heavy meromyosin (HMM), myosin-5a isolated from chicken brain, and recombinant Dictyostelium myosin class-1, 2 and 5 motor-domain constructs (FIG. 9a). The semi-logarithmic plot shows the concentration dependence for myosin-1E (◯), myosin-2 (▪), myosin-5b (Δ) from D. discoideum, and for chicken myosin-5a (▾). The concentrations of PBP required for half-maximal inhibition of the different myosin motors was calculated from fitting the data to hyperbolae. The strongest inhibition was observed for chicken myosin-5a (Kᵢ=1.19 μM±0.20), followed by Dictyostelium myosin-5b (Kᵢ=19.3 μM±0.85), Dictyostelium myosin-2 (Kᵢ=24 μM±1.5), HMM (Kᵢ=23 μM±5), and Dictyostelium myosin-1E (Kᵢ=49.5 μM±1.5) (FIG. 9a). The ATPase activity at 30 μM F-actin decreased in the presence of >100 μM PBP for chicken myosin-5a from 8.5 s⁻¹ to 0.34 s⁻¹, for Dictyostelium myosin-5b from 5.5 s⁻¹ to 0.05 s⁻¹, for Dictyostelium myosin-2 from 0.7 s⁻¹ to 0.02 s⁻¹, and for Dictyostelium myosin-1E from 3.5 s⁻¹ to 0.10 s⁻¹. To determine the extend to which PBP impairs the coupling between the actin- and nucleotide-binding sites of myosin, we measured the ATP turn-over rates of Dictyostelium myosin-2 and myosin-5b motor domain constructs over the range from 0 to 50 μM F-actin in the absence and presence of 25 μM PBP.

[0181] Values for the rate of maximum ATP turnover (kcat), the concentration of F-actin at which half-maximal activation is achieved (Kapp), and the apparent second order rate constant for actin binding (kcat/Kapp) were estimated from a fit of the data to a hyperbolic function. kcat/Kapp is a direct measure of the coupling efficiency between actin and nucleotide binding and can be determined from the initial slope at F-actin concentrations much smaller than Kapp. Coupling was 26-fold weaker for myosin-5b (0.32 μM-1 s-1/0.012 μM-1 s-1), whereas a 3.7-fold reduction in coupling was observed for myosin-2 (0.037 μM-1 s-1/0.010 μM-1 s-1). ATP turn-over rates of Dictyostelium myosin-2 (◯) and Dictyostelium myosin-5b (▪) at increasing F-actin concentrations in the absence (filled symbols) and presence (open symbols) of 25 μM pentabromopseudilin (FIG. 9b):

### ATP Binding Kinetics

[0182] Effect of Pentabromopseudilin on ATP binding kinetics to DdMyosin-5b and acto-DdMyosin-5b. (FIG. 10a) Fluorescence transients obtained upon mixing 1 μM DdMyosin-5b with 10 μM mantATP in the absence and presence of 5 μM, 25 μM, 50 μM and 100 μM PBP. Mant-fluorescence was excited at 365 nm and detected after passing through a KV 389 nm cut-off filter. The fluorescent signal of mantATP binding to DdMyosin-5b in the absence of PBP follows a single exponential function (upper curve). The presence of increasing concentrations of PBP lead to reduced amplitudes of the fluorescent signals that are best fit by double exponentials. (FIG. 10b) Plot of the relative amplitudes of mantATP binding to Dd Myosin-5b at different PBP concentrations. A hyperbolic fit to the data yields an apparent constant K_{d} of 21±2 μM that is well consistent with the Kᵢ value (19.14 μM) determined from the steady state ATPase measurements in FIG. 9b. (FIG. 10c) Fluorescence transients of the ATP induced dissociation of pyrene-acto-DdMyosin-5b in the absence (black curve) and presence (grey curve) of 50 μM PBP. (FIG. 10d) Quench-flow experiments of the ATP hydrolysis reaction upon mixing 5 μM M761 with 25 μM ATP in the absence (solid squares) and presence (open circles) of 50 μM PBP. The Pᵢ-burst (k_{burst}=7.8±0.2 sin the absence and 2.5±0.1 s⁻¹ in the presence of PBP) was followed by a linear steady-state phase. The amplitude of the burst was 0.95 in the absence and 0.5 in the presence of PBP.

[0183] The extent and order of isoform-specific differences in the potency of the inhibitor were additionally confirmed by the results of in vitro motility assays). The histograms shows the average sliding velocity of Rh/Ph-labeled actin filaments in the absence and presence of 10 μM PBP. (FIG. 11a) Myosin-5a moves actin filaments with an average velocity of 0.6 μm/s±0.05 (dark bars); addition of 10 μM PBP into the same flow cell lead to a 46-fold reduction of the average sliding velocity to 0.013 μm/s±0.002 (light grey bars). A 2-to-3-fold reduction in the average gliding velocity was observed for myosin-2 at 100 μM PBP concentrations (FIG. 11b). No significant inhibition was seen with myosin-1E (data not shown).

[0184] To test the effect of PBP on fully assembled myofilament arrays, we examined the contractile properties of skinned muscle fibre preparations from rabbit psoas muscle. Pentabromopseudilin leads to a more than 4-fold reduction in isometric force development of skinned muscle fibre preparations from rabbit psoas muscle. The Ki is in the same range as that determined for actomyosin ATPase activity. (FIG. 12)

### Inhibition of Myosin-5-Dependent Cellular Processes

[0185] To test the specific inhibition of myosin-5 function in a cellular context, we exposed Saccharomyces cerevisiae cells to 100 to 500 nM PBP. S. cerevisiae has five myosin heavy chain genes: a myosin-2, two class-1 myosins, and the class-5 myosins Myo2p and Myo4p. Myo2p plays a crucial role in polarized distribution of mitochondria and is required for retention of newly inherited mitochondria in yeast cells during cell division⁴⁻⁶. Myo4p is required for mRNA transport and facilitates movement of ER tubules into the growing bud. Myo4p null mutants are viable and display no detectable phenotype. Deletion of the myo3 and myo5 genes, encoding class-1 myosins, leads to severe defects in growth and actin cytoskeletal organization. Severe growth defects are also observed upon depletion of the class-2 myosin Myo1p. Therefore, we expected that selective inhibition of class-5 myosins will produce readily detectable changes in the morphology of mitochondria without affecting cell growth and cytokinesis. To facilitate the visual inspection of mitochondrial morphology, we transfected the cells used for these experiments with an expression vector for the production of mitochondria-targeted GFP⁷. A yeast mutant strain with myo2 expression under the control of the TetO₇ promoter was used as control⁸. Repression of the TetO₇ promoter by the addition of 10 μg/ml deoxycycline to the culture medium of this strain led to an apparent fragmentation of mitochondria. Similar phenotypic changes were observed when wild-type cells were exposed to 500 nM PBP for 12 hours (FIG. 13c). At lower concentrations the phenotype was less severe and at 100 nM PBP the mitochondrial morphology closely resembled that of untreated wild-type cells. Yeast cells exposed to 500 nM PBP showed similar growth kinetics as the wild type control cultures. These observations confirm the more potent inhibition of class-5 myosins observed the in vitro experiments and predicted by the in silica studies.

[0186] The results from the actin-activated ATPase measurements clearly demonstrate that PBP impairs the ability of myosins to effectively interact with nucleotides and actin; however the extent of inhibition by PBP is quite different for the individual myosins. The strongest inhibition was observed for class-5 myosins. In this case, the inhibitor caused a more than 25-fold increase in Kₐₚₚ and an approximately 8-fold decrease in k_{cat}, while the same Michaelis-Menten parameters were less affected for a corresponding myosin-2 motor-domain construct.

### Methods

[0187] Protein preparation. Rabbit fast skeletal muscle heavy meromyosin (HMM) was prepared as described by Kron and Spudich⁹. Motor domain constructs of myosin-1E, myosin-2, and myosin-5b from Dictyostelium discoideum comprising amino acids 1-698, 1-765, and 1-839 respectively, were prepared as described previouslyl¹⁰⁻¹². Myosin-5a heavy meromyosin from chicken brain was provided by Dr. T. Scholz (Hannover Medical School, Germany) and F-actin was prepared as described by Lehrer and Kerwar¹³.

[0188] Crystallization experiments were performed with myosin motor domain construct M761-c14 consisting of an N-terminal His-tag, amino acids 3 to 761 of myosin-2 from D. discoideum followed by a leucine and a glutamate residue and the 14 C-terminal residues of EcoSSB¹⁴. The protein was expressed in D. discoideum AX3-ORF+ cells and purified by Ni²⁺-chelate affinity chromatography as described previously¹⁵. Subsequently the protein was applied onto a Resource Q column (GE Healthcare) equilibrated with storage buffer (1 mM magnesium acetate, 0.5 mM EDTA, 0.2 mM EGTA, 1 mM benzamidine, 1 mM DTT, 50 mM Tris/HCl pH 7.5), followed by an elution with a gradient from 0 to 0.5 M KCl. The peak fractions were concentrated to 10 mg/ml using ultrafiltration (Vivaspin 20, Vivascience) and dialyzed against storage buffer containing 3% (w/v) sucrose. Aliquots of 100 μl were flash frozen in liquid nitrogen and stored at −80° C.

[0189] Synthesis of halogenated pseudilins. PBP and the other halogenated pseudilin derivates used in this study were synthesized using silver(I)-catalyzed pyrrole synthesis for the cyclization reaction to the heterocyclic system as described previously¹⁶.

[0190] Inhibitor screening. To screen compound libraries for myosin effectors, colorimetric high-throughput assays for myosin ATPase activity were performed with heavy meromyosin (HMM) prepared from rabbit skeletal muscle myosin-2. N_{α}-Tosyl-L-lysine chloromethyl ketone hydrochloride treated α-chymotrypsin was used for the generation of HMM. Each reaction mixture including the controls contained 2.5% DMSO that was used as solvent for the small organic compounds. Reactions containing HMM (0.01 mg/ml), assay buffer (50 mM KCl, 5 mM CaCl₂, 25 mM Tris-HCl pH 7.5) and 25 μM of the respective inhibitor were started by the addition of 50 μM ATP and incubated in for 20 min at 37° C. Reactions were terminated by the addition of Biomoi Green (Biomol, Hamburg, Germany). The amount of dye formed after 20 min color development at room temperature was determined with a Tecan Infinite™ microplate reader (Cralisheim, Germany).

[0191] Crystallization and data collection. The complex of M761-c14 with HET43 and ADP-VO₃ was obtained by adding 2 mM of PBP, MgCl₂, ADP and sodium meta-vanadate to the protein solution and incubation on ice for 1 hour. Crystals of the complex were grown in the dark at 4° C. using the hanging drop geometry. 2 μl of complex solution and 2 μl of reservoir solution were mixed, the latter contained 50 mM HEPES pH 7.4, 140 mM NaCl, 11% w/v PEG8000, 2% (v/v) MPD, 5 mM MgCl₂, 5 mM DTT, and 1 mM EGTA. Rectangular shaped crystals appeared within 3 weeks. Prior to diffraction data collection the crystals were soaked for 5 minutes at 4° C. in a cryo-protection solution containing reservoir solution supplemented with 25% ethylene glycol, 2 mM sodium meta-vanadate, 2 mM ADP and 2 mM HET43. Subsequently, crystals were flash-cooled in liquid nitrogen. Diffraction data were collected in house using a Bruker X8PROTEUM equipped with cryo-system, κ-goniometer and CCD-detector. We processed the data with PROTEUM2 software (Bruker AXS).

[0192] Molecular modeling. The motor domain structures of Dictyostelium myosin-1E (PDB entry 1 LKX) and chicken myosin-5A (PDB entry 1OE9) were used to model the complexes of class-1 and class-5 myosins with Het43. Initial models were created by inserting HET43 coordinates from superimposed myo2-HET43 complex. Next molecular mechanics energy minimization procedures were performed for HET43 in the new protein environment using the CNS software suit¹⁷. The resulting structures were subjected to a more precise quantum chemical energy minimization procedure, using ab initio DFT QM/MM calculations with the 6-31G* basis set of atomic orbitals and B3LYP hybrid functional. The quantum chemical calculations were performed using the PC GAMESS version developed by Alex A. Granovsky (http://www.classic.chem.msu.su/gran/gamess/index.html) of the GAMESS (US) Quantum Chemistry package¹⁸.

[0193] Steady-state kinetics. Basal and actin-activated Mg²⁺-ATPase activities were measured with the NADH-coupled assay¹⁹ in a buffer containing 25 mM HEPES, 25 mM KCl, and 4 mM MgCl₂, 0.5 mM DTT at pH 7.0 in the presence of 1 mM ATP at 25° C. PBP was added to the reaction mixture in the absence of nucleotide and incubated for 20 minutes before the reaction was started by the addition of ATP. NADH oxidation was followed using the change in absorption at 340 nm in a Beckman DU-800 spectrophotometer.

[0194] Transient kinetic experiments: Stopped-flow measurements were performed with an Applied Photophysics PiStar instrument in a buffer containing 25 mM HEPES, 25 mM KCl, 1 mM DTT, 4 mM MgCl₂, pH 7.0 at 20° C. using procedures and kinetic models described previously (1-3). The binding and hydrolysis of ATP and mantATP, respectively by myosin head fragments were analyzed in terms of the seven-step model described by Bagshaw and coworkers (4). Transients in the presence of actin were analyzed according to the mechanisms described in references 5 and 6.

[0195] Direct functional Assays. Actin-sliding motility was performed at 25° C. using an Olympus IX81 inverted fluorescence microscope. Experimental flow cells were constructed using bovine serum albumin (0.5 mg/ml in assay buffer)-coated glass slides and nitrocellulose-coated coverslips. Myosins were actin affinity-purified immediately before use, to remove rigor heads²⁰. Sliding movement was started by adding assay buffer containing 4 mM ATP, 10 mM DTT, 0.5 mg/ml bovine serum albumin, anti-fade solution, and 0.5% methylcellulose to the flow cell. Average sliding velocity was determined from the Gaussian distribution of automatically tracked actin filaments using DiaTrack 3.0 and Origin 7.0.

[0196] Quench-flow Experiments. Experiments were performed in a BioLogic QFM-400 apparatus. 20 μl of a 50 μM γ-³³P-ATP solution (0.3 μCi/μl) were mixed with an equal amount of 10 μM myosin solution in the absence and presence of 50 μM PBP in the assay buffer (25 mM HEPES, pH 7.3, 4 mM MgCl₂, 1 mM DTT, and 25 mM KCl at 25° C.). The reaction was quenched after a well defined period of time by the addition of 176 μl 1 M perchloric acid and rapidly neutralized by 60 μl of an 8 M KOAc. After centrifugation, 2 μl aliquots of the supernatant were spotted on a thin-layer chromatography (TLC) plate (Polygram CEL 300 PEI, cellose-molyethylenimin, Machery-Nagel). The hydrolysis products were separated in a 1.2 M LiCl solution containing 1 M HCOOH. The relative amounts of P₁ and ATP were quantified using a phosphorimager (Fujix BAS1000, Fuji), the software MacBAS V 2.4, TINA V 2.09f, and Origin 7.0.

[0197] Myo2p-dependent changes in mitochondrial morphology. The predicted strong inhibitory effect of PDP on myosin activity was tested in viva, making use of the phenotypic changes induced by the depletion of the class-5 myosin Myo2p in S. cerevisiae. Yeast strains producing mitochondria-targeted GFP were supplied by Dr. B. Westermann⁷, allowing us to study the morphology of yeast mitochondria in a fluorescence microscope. Repression of the TetO₇ promoter that controls myo2 in one of the mutant strains was achieved by the addition of 10 μg/ml deoxycycline to the culture medium⁸. Cells were analyzed at the end of the logarithmic growth phase. Yeast cells exposed to 500 nM PDP showed almost the same growth kinetics as wild type control cultures. Addition of 0.05% DMSO used as solvent vehicle for PBP had no effect on growth. Images of the mitochondrial phenotype were acquired using a Zeiss confocal microscope (LSM 510) equipped with a 63× oil immersion objective. Additional images of the same cells in transmitted light were acquired using a Hamamatsu ORCA camera.

TABLE 2
Data collection, structure solution and refinement
statistics for the ternary myosin-2 motor domain - ADP•
VO₃ - Pentabromopseudilin complex

| | |
|---|---|
| | Myosin-2 - ADP•VO₃ - |
| Complex | Pentabromopseudilin |

Crystal parameters

| | |
|---|---|
| Group | C222₁ |
| Cell parameters: a, b, c; α, β, γ | 89.8, 150.5, 154.6; 90, 90, 90 |

Data collection

| | |
|---|---|
| X-ray source | X8PROTEUM, Bruker |
| Wave length (Å) | 1.54178 |
| Resolution of data (Å) | 2.8 |
| No. of observations/ | 134833/25708 |
| unique reflections | |
| Completeness (total/high) % | 98.2/95.5 |
| <I/σ(I)> (total/high) | 10.9/2.4 |
| R_{sym} (total/high) % | 8.8/40.4 |

Refinement

| | |
|---|---|
| Resolution range (Å) | 8.0-2.8 |
| Included amino acids | 776 |
| No. of protein atoms | 6240 |
| No. of waters | 475 |
| R_{work}/R_{free} % | 21.7/26.5 |
| r.m.s. deviation for bonds (Å)/angles | 0.009/14 |
| (deg) | |

### EXAMPLE 3

### Selectivity for Myosin Isoforms

[0198] KIN-43 shows preferred selectivity for mammalian myosin-5a, KIN-68 displays preferred selectivity for myosin-1 isoforms. In this context, preferred selectivity means a more than 20-fold smaller IC50 value compared to fast skeletal muscle myosin-2 and other references myosins.

### EXAMPLE 4

### Activators and Uncouplers of Myosin Function

[0199] Compounds KIN-74, KIN-77 are activators of myosin-2 function. KIN-74 activates the ATPase activity of Dictyostelium myosin-2 in the absence of actin. ATPase activity is uncoupled from motor activity in this situation. The apparent half-maximum activation constant AC₅₀ corresponds to 18 μM. Uncouplers have potential applications in inhibiting the overcontraction and overextension of cardiac muscles without being accompanied with a cardioinhibitory action. Therefore, compounds derived from KIN-74 have potential applications in the treatment of acute myocardial infarction helping to prevent the necrosis of cardiac muscles.

[0200] KIN-77 activates the actin-activated ATPase and motor activity of rabbit myosin-2 with a half maximum activation concentration AC₅₀=19.2 μM. KIN-77 is an ideal lead compounds for the development of optimized activators of myosin motor activity, Optimized activators have potential applications in diseases where myosin motility is impaired and contractility needs to be restored, as in the case of cardiomyopathies and congestive heart failures.

### EXAMPLE 5

### KIN-93 is an Inhibitor of Myosin-14-Dependet Motility in Plasmodium

[0201] Plasmodium sporozoites are moving at very low speed in the salivary glands of infected mosquitoes but are moving at high speed (2 μm/s) upon transmission into the vertebrate host. In vivo microscopy showed that sporozoites can move extensively within the dermis and when associated with blood and lymph vessels, which they can both invade. We followed single parasites using in vitro imaging approaches in combination with our bioactive compounds and discovered some intriguing features of sporozoite motility. Under normal conditions sporozoites move in circles, either counterclockwise or clockwise. Two other states of attachment and waving are less populated.

[0202] In the presence of 10 μM KIN-93, the number of sporozoite that followed counterclockwise or clockwise movement was strongly reduced. In addition, their gliding velocity was only half as fast as compared with control parasites. In addition to sporozoite impairment, in vitro growth assays indicate that the compound applied at concentration of 25 μM has an effect on the blood stages of malaria, too, by reducing the number of Plasmodium merozoites. No general cytotoxicity for erythrocytes or for Plasmodium sporozoites was recorded in any of the assays.

### EXAMPLE 6

### Optimization of Pharmacological Properties by In Silica Assisted Methods

[0203] Based on the X-ray structures of myosin-2 motor domains in complex with KIN-43 and related inhibitors of myosin function, we have gained a detailed understanding of the pharmacophore requirements of the allosteric binding site. By applying in silico assisted methods, we optimized the pharmacological properties of the initial bioactive compounds. We are using a library of common organic molecules and functional groups and are applying an empirical force field description of the nonbonding interactions between a ligand and the binding site in order to build up de novo compounds with spatial and electrostatic properties complementary to the allosteric binding site. KIN-93 is the result of a target directed drug design that shows improved pharmacological properties in relation to KIN-43. Cell viability is vastly improved in the presence of KIN-93. Neutral red uptake experiments do not reveal any defects. In addition, Medaka fish-based assays show that embryonic development is not impaired in the presence of KIN-93.

### EXAMPLE 7

### Structure of the Myosin-2-KIN79 Co-Crystal

[0204] The pdb coordinate file below shows the structure of the complex of the carbazole KIN-79 with myosin-2.

| | |
|---|---|
| REMARK | coordinates from minimization refinement |
| REMARK | refinement resolution: 500.0-2.2 A |
| REMARK | starting r = 0.3111 free_r = 0.3624 |
| REMARK | final r = 0.3067 free_r = 0.3617 |
| REMARK | rmsd bonds = 0.008031 rmsd angles = 1.30849 |
| REMARK | wa = 4.4505 |
| REMARK | target = mlf cycles = 1 steps = 200 |
| REMARK | sg = C222(1) a = 88.18 b = 149.90 c = 154.27 alpha = 90.0 beta = 90.0 gamma = 90 |
| REMARK | parameter file 1: CNS_TOPPAR: protein_rep.param |
| REMARK | parameter file 2: CNS_TOPPAR: ion.param |
| REMARK | parameter file 5: CNC_TOPPAR: water_rep.param |
| REMARK | molecular structure file: gen.mtf |
| REMARK | input coordinates: anneal_l.pdb |
| REMARK | reflection file = myo2het79.cv |
| REMARK | ncs = none |
| REMARK | B-correction resolution: 6.0-2.2 |
| REMARK | initial B-factor correction applied to fobs: |
| REMARK | B11 = 0.541 B22 = −12.873 B33 = 12.332 |
| REMARK | B12 = 0.000 B13 = 0.000 B23 = 0.000 |
| REMARK | B-factor correction applied to coordinate array B: −2.640 |
| REMARK | bulk solvent: density level = 0.319696 e/A\hat{ }3, B-factor = 33.6052 A\hat{ }2 |
| REMARK | reflections with \|Fobs\|/sigma_F < 0.0 rejected |
| REMARK | reflections with \|Fobs\| > 10000 * rms(Fobs) rejected |
| REMARK | theoretical total number of refl. in resol. range: 52178 (100.0%) |
| REMARK | number of unobserved reflections (no entry or \|F\| = 0): 81 (0.2%) |
| REMARK | number of reflections rejected: 0 (0.0%) |
| REMARK | total number of reflections used: 52097 (99.8%) |
| REMARK | number of reflections in working set: 49492 (94.9%) |
| REMARK | number of reflections in test set: 2605 (5.0%) |
| CRYST1 | 88.180 149.900 154.270 90.00 90.00 90.00 C 2 2 21 |

| | | | | | | | | | | | |
|---|---|---|---|---|---|---|---|---|---|---|---|
| ATOM | 1 | CB | ASP | 2 | 85.030 | 36.802 | 1.978 | 1.00 | 36.83 | | C |
| ATOM | 2 | CG | ASP | 2 | 84.767 | 36.108 | 0.646 | 1.00 | 36.83 | | C |
| ATOM | 3 | OD1 | ASP | 2 | 85.172 | 34.930 | 0.491 | 1.00 | 36.83 | | O |
| ATOM | 4 | OD2 | ASP | 2 | 84.163 | 36.745 | −0.251 | 1.00 | 36.83 | | O |
| ATOM | 5 | C | ASP | 2 | 82.800 | 37.942 | 2.028 | 1.00 | 36.83 | | C |
| ATOM | 6 | O | ASP | 2 | 82.248 | 37.200 | 2.832 | 1.00 | 36.83 | | O |
| ATOM | 7 | N | ASP | 2 | 84.595 | 38.785 | 3.426 | 1.00 | 36.83 | | N |
| ATOM | 8 | CA | ASP | 2 | 84.309 | 38.154 | 2.093 | 1.00 | 36.83 | | C |
| ATOM | 9 | N | PRO | 3 | 82.116 | 38.612 | 1.083 | 1.00 | 36.83 | | N |
| ATOM | 10 | CD | PRO | 3 | 82.704 | 39.658 | 0.232 | 1.00 | 36.83 | | C |
| ATOM | 11 | CA | PRO | 3 | 80.667 | 38.545 | 0.865 | 1.00 | 36.83 | | C |
| ATOM | 12 | CB | PRO | 3 | 80.481 | 39.420 | −0.368 | 1.00 | 36.83 | | C |
| ATOM | 13 | CG | PRO | 3 | 81.500 | 40.474 | −0.136 | 1.00 | 36.83 | | C |
| ATOM | 14 | C | PRO | 3 | 80.056 | 37.165 | 0.680 | 1.00 | 36.83 | | C |
| ATOM | 15 | O | PRO | 3 | 79.024 | 36.853 | 1.268 | 1.00 | 36.83 | | O |
| ATOM | 16 | N | ILE | 4 | 80.683 | 36.344 | −0.154 | 1.00 | 36.83 | | N |
| ATOM | 17 | CA | ILE | 4 | 80.178 | 35.003 | −0.426 | 1.00 | 36.83 | | C |
| ATOM | 18 | CB | ILE | 4 | 81.280 | 34.114 | −1.051 | 1.00 | 36.83 | | C |
| ATOM | 19 | CG2 | ILE | 4 | 80.701 | 32.766 | −1.426 | 1.00 | 36.83 | | C |
| ATOM | 20 | CG1 | ILE | 4 | 81.850 | 34.793 | −2.297 | 1.00 | 36.83 | | C |
| ATOM | 21 | CD1 | ILE | 4 | 83.126 | 34.159 | −2.849 | 1.00 | 36.83 | | C |
| ATOM | 22 | C | ILE | 4 | 79.619 | 34.284 | 0.811 | 1.00 | 36.83 | | C |
| ATOM | 23 | O | ILE | 4 | 78.523 | 33.706 | 0.757 | 1.00 | 36.83 | | O |
| ATOM | 24 | N | HIS | 5 | 80.351 | 34.337 | 1.924 | 1.00 | 36.83 | | N |
| ATOM | 25 | CA | HIS | 5 | 79.938 | 33.634 | 3.141 | 1.00 | 36.83 | | C |
| ATOM | 26 | CB | HIS | 5 | 81.126 | 32.885 | 3.730 | 1.00 | 36.83 | | C |
| ATOM | 27 | CG | HIS | 5 | 81.702 | 31.857 | 2.807 | 1.00 | 36.83 | | C |
| ATOM | 28 | CD2 | HIS | 5 | 82.836 | 31.858 | 2.065 | 1.00 | 36.83 | | C |
| ATOM | 29 | ND1 | HIS | 5 | 81.060 | 30.667 | 2.530 | 1.00 | 36.83 | | N |
| ATOM | 30 | CE1 | HIS | 5 | 81.774 | 29.980 | 1.654 | 1.00 | 36.83 | | C |
| ATOM | 31 | NE2 | HIS | 5 | 82.856 | 30.679 | 1.354 | 1.00 | 36.83 | | N |
| ATOM | 32 | C | HIS | 5 | 79.312 | 34.494 | 4.223 | 1.00 | 36.83 | | C |
| ATOM | 33 | O | HIS | 5 | 78.933 | 33.995 | 5.285 | 1.00 | 36.83 | | O |
| ATOM | 34 | N | ASP | 6 | 79.204 | 35.786 | 3.972 | 1.00 | 36.83 | | N |
| ATOM | 35 | CA | ASP | 6 | 78.593 | 36.640 | 4.962 | 1.00 | 36.83 | | C |
| ATOM | 36 | CB | ASP | 6 | 79.223 | 38.029 | 4.929 | 1.00 | 36.83 | | C |
| ATOM | 37 | CG | ASP | 6 | 78.534 | 38.983 | 5.866 | 1.00 | 36.83 | | C |
| ATOM | 38 | OD1 | ASP | 6 | 77.897 | 38.494 | 6.824 | 1.00 | 36.83 | | O |
| ATOM | 39 | OD2 | ASP | 6 | 78.630 | 40.213 | 5.653 | 1.00 | 36.83 | | O |
| ATOM | 40 | C | ASP | 6 | 77.088 | 36.726 | 4.703 | 1.00 | 36.83 | | C |
| ATOM | 41 | O | ASP | 6 | 76.641 | 37.453 | 3.809 | 1.00 | 36.83 | | O |
| ATOM | 42 | N | ARG | 7 | 76.315 | 35.979 | 5.489 | 1.00 | 36.83 | | N |
| ATOM | 43 | CA | ARG | 7 | 74.858 | 35.968 | 5.341 | 1.00 | 36.83 | | C |
| ATOM | 44 | CB | ARG | 7 | 74.229 | 34.940 | 6.293 | 1.00 | 36.83 | | C |
| ATOM | 45 | CG | ARG | 7 | 74.983 | 33.603 | 6.376 | 1.00 | 36.83 | | C |
| ATOM | 46 | CD | ARG | 7 | 74.044 | 32.479 | 6.807 | 1.00 | 36.83 | | C |
| ATOM | 47 | NE | ARG | 7 | 74.709 | 31.205 | 7.106 | 1.00 | 36.83 | | N |
| ATOM | 48 | CZ | ARG | 7 | 75.605 | 30.592 | 6.329 | 1.00 | 36.83 | | C |
| ATOM | 49 | NH1 | ARG | 7 | 75.987 | 31.122 | 5.176 | 1.00 | 36.83 | | N |
| ATOM | 50 | NH2 | ARG | 7 | 76.107 | 29.421 | 6.702 | 1.00 | 36.83 | | N |
| ATOM | 51 | C | ARG | 7 | 74.229 | 37.336 | 5.602 | 1.00 | 36.83 | | C |
| ATOM | 52 | O | ARG | 7 | 73.035 | 37.433 | 5.879 | 1.00 | 36.83 | | O |
| ATOM | 53 | N | THR | 8 | 75.019 | 38.398 | 5.499 | 1.00 | 36.83 | | N |
| ATOM | 54 | CA | THR | 8 | 74.489 | 39.731 | 5.773 | 1.00 | 36.83 | | C |
| ATOM | 55 | CB | THR | 8 | 75.126 | 40.306 | 7.051 | 1.00 | 36.83 | | C |
| ATOM | 56 | OG1 | THR | 8 | 76.469 | 40.716 | 6.773 | 1.00 | 36.83 | | O |
| ATOM | 57 | CG2 | THR | 8 | 75.150 | 39.251 | 8.155 | 1.00 | 36.83 | | C |
| ATOM | 58 | C | THR | 8 | 74.749 | 40.699 | 4.624 | 1.00 | 36.83 | | C |
| ATOM | 59 | O | THR | 8 | 74.237 | 41.832 | 4.598 | 1.00 | 36.83 | | O |
| ATOM | 60 | N | SER | 9 | 75.570 | 40.252 | 3.686 | 1.00 | 36.83 | | N |
| ATOM | 61 | CA | SER | 9 | 75.920 | 41.070 | 2.537 | 1.00 | 36.83 | | C |
| ATOM | 62 | CB | SER | 9 | 77.186 | 40.517 | 1.874 | 1.00 | 36.83 | | C |
| ATOM | 63 | OG | SER | 9 | 76.976 | 39.205 | 1.376 | 1.00 | 36.83 | | O |
| ATOM | 64 | C | SER | 9 | 74.779 | 41.078 | 1.525 | 1.00 | 36.83 | | C |
| ATOM | 65 | O | SER | 9 | 73.923 | 40.186 | 1.538 | 1.00 | 36.83 | | O |
| ATOM | 66 | N | ASP | 10 | 74.770 | 42.092 | 0.658 | 1.00 | 36.83 | | N |
| ATOM | 67 | CA | ASP | 10 | 73.757 | 42.189 | −0.388 | 1.00 | 36.83 | | C |
| ATOM | 68 | CB | ASP | 10 | 74.066 | 43.369 | −1.303 | 1.00 | 36.83 | | C |
| ATOM | 69 | CG | ASP | 10 | 73.682 | 44.697 | −0.691 | 1.00 | 36.83 | | C |
| ATOM | 70 | OD1 | ASP | 10 | 74.272 | 45.716 | −1.111 | 1.00 | 36.83 | | O |
| ATOM | 71 | OD2 | ASP | 10 | 72.794 | 44.716 | 0.198 | 1.00 | 36.83 | | O |
| ATOM | 72 | C | ASP | 10 | 73.780 | 40.905 | −1.219 | 1.00 | 36.83 | | C |
| ATOM | 73 | O | ASP | 10 | 72.753 | 40.447 | −1.692 | 1.00 | 36.83 | | O |
| ATOM | 74 | N | TYR | 11 | 74.973 | 40.354 | −1.404 | 1.00 | 36.83 | | N |
| ATOM | 75 | CA | TYR | 11 | 75.151 | 39.137 | −2.172 | 1.00 | 36.83 | | C |
| ATOM | 76 | CB | TYR | 11 | 76.631 | 38.731 | −2.200 | 1.00 | 36.83 | | C |
| ATOM | 77 | CG | TYR | 11 | 76.872 | 37.319 | −2.685 | 1.00 | 36.83 | | C |
| ATOM | 78 | CD1 | TYR | 11 | 76.866 | 36.246 | −1.794 | 1.00 | 36.83 | | C |
| ATOM | 79 | CE1 | TYR | 11 | 77.033 | 34.954 | −2.230 | 1.00 | 36.83 | | C |
| ATOM | 80 | CD2 | TYR | 11 | 77.060 | 37.050 | −4.035 | 1.00 | 36.83 | | C |
| ATOM | 81 | CE2 | TYR | 11 | 77.234 | 35.751 | −4.487 | 1.00 | 36.83 | | C |
| ATOM | 82 | CZ | TYR | 11 | 77.217 | 34.704 | −3.579 | 1.00 | 36.83 | | C |
| ATOM | 83 | OH | TYR | 11 | 77.364 | 33.410 | −4.019 | 1.00 | 36.83 | | O |
| ATOM | 84 | C | TYR | 11 | 74.304 | 38.001 | −1.621 | 1.00 | 36.83 | | C |
| ATOM | 85 | O | TYR | 11 | 73.816 | 37.172 | −2.380 | 1.00 | 36.83 | | O |
| ATOM | 86 | N | HIS | 12 | 74.133 | 37.955 | −0.306 | 1.00 | 36.83 | | N |
| ATOM | 87 | CA | HIS | 12 | 73.318 | 36.910 | 0.298 | 1.00 | 36.83 | | C |
| ATOM | 88 | CB | HIS | 12 | 73.740 | 36.663 | 1.743 | 1.00 | 36.83 | | C |
| ATOM | 89 | CG | HIS | 12 | 74.474 | 35.374 | 1.936 | 1.00 | 36.83 | | C |
| ATOM | 90 | CD2 | HIS | 12 | 75.798 | 35.087 | 1.901 | 1.00 | 36.83 | | C |
| ATOM | 91 | ND1 | HIS | 12 | 73.828 | 34.177 | 2.156 | 1.00 | 36.83 | | N |
| ATOM | 92 | CE1 | HIS | 12 | 74.720 | 33.208 | 2.249 | 1.00 | 36.83 | | C |
| ATOM | 93 | NE2 | HIS | 12 | 75.924 | 33.733 | 2.098 | 1.00 | 36.83 | | N |
| ATOM | 94 | C | HIS | 12 | 71.849 | 37.279 | 0.243 | 1.00 | 36.83 | | C |
| ATOM | 95 | O | HIS | 12 | 70.995 | 36.437 | −0.073 | 1.00 | 36.83 | | O |
| ATOM | 96 | N | LYS | 13 | 71.555 | 38.539 | 0.536 | 1.00 | 36.83 | | N |
| ATOM | 97 | CA | LYS | 13 | 70.183 | 39.008 | 0.511 | 1.00 | 36.83 | | C |
| ATOM | 98 | CB | LYS | 13 | 70.110 | 40.449 | 1.026 | 1.00 | 36.83 | | C |
| ATOM | 99 | CG | LYS | 13 | 68.692 | 41.032 | 1.011 | 1.00 | 36.83 | | C |
| ATOM | 100 | CD | LYS | 13 | 68.637 | 42.401 | 1.685 | 1.00 | 36.83 | | C |
| ATOM | 101 | CE | LYS | 13 | 67.195 | 42.848 | 1.954 | 1.00 | 36.83 | | C |
| ATOM | 102 | NZ | LYS | 13 | 67.078 | 44.178 | 2.674 | 1.00 | 36.83 | | N |
| ATOM | 103 | C | LYS | 13 | 69.532 | 38.938 | −0.880 | 1.00 | 36.83 | | C |
| ATOM | 104 | O | LYS | 13 | 68.322 | 38.722 | −0.985 | 1.00 | 36.83 | | O |
| ATOM | 105 | N | TYR | 14 | 70.324 | 39.108 | −1.943 | 1.00 | 36.83 | | N |
| ATOM | 106 | CA | TYR | 14 | 69.755 | 39.113 | −3.287 | 1.00 | 36.83 | | C |
| ATOM | 107 | CB | TYR | 14 | 70.117 | 40.418 | −4.002 | 1.00 | 36.83 | | C |
| ATOM | 108 | CG | TYR | 14 | 69.593 | 41.634 | −3.299 | 1.00 | 36.83 | | C |
| ATOM | 109 | CD1 | TYR | 14 | 68.249 | 41.730 | −2.968 | 1.00 | 36.83 | | C |
| ATOM | 110 | CE1 | TYR | 14 | 67.751 | 42.845 | −2.305 | 1.00 | 36.83 | | C |
| ATOM | 111 | CD2 | TYR | 14 | 70.437 | 42.688 | −2.950 | 1.00 | 36.83 | | C |
| ATOM | 112 | CE2 | TYR | 14 | 69.950 | 43.807 | −2.287 | 1.00 | 36.83 | | C |
| ATOM | 113 | CZ | TYR | 14 | 68.607 | 43.876 | −1.970 | 1.00 | 36.83 | | C |
| ATOM | 114 | OH | TYR | 14 | 68.104 | 44.968 | −1.324 | 1.00 | 36.83 | | O |
| ATOM | 115 | C | TYR | 14 | 70.072 | 37.962 | −4.216 | 1.00 | 36.83 | | C |
| ATOM | 116 | O | TYR | 14 | 69.418 | 37.820 | −5.252 | 1.00 | 36.83 | | O |
| ATOM | 117 | N | LEU | 15 | 71.059 | 37.142 | −3.870 | 1.00 | 36.83 | | N |
| ATOM | 118 | CA | LEU | 15 | 71.419 | 36.032 | −4.740 | 1.00 | 36.83 | | C |
| ATOM | 119 | CB | LEU | 15 | 72.788 | 36.286 | −5.346 | 1.00 | 36.83 | | C |
| ATOM | 120 | CG | LEU | 15 | 72.827 | 37.366 | −6.416 | 1.00 | 36.83 | | C |
| ATOM | 121 | CD1 | LEU | 15 | 74.259 | 37.758 | −6.708 | 1.00 | 36.83 | | C |
| ATOM | 122 | CD2 | LEU | 15 | 72.131 | 36.843 | −7.650 | 1.00 | 36.83 | | C |
| ATOM | 123 | C | LEU | 15 | 71.411 | 34.667 | −4.088 | 1.00 | 36.83 | | C |
| ATOM | 124 | O | LEU | 15 | 71.684 | 33.671 | −4.748 | 1.00 | 36.83 | | O |
| ATOM | 125 | N | LYS | 16 | 71.097 | 34.617 | −2.796 | 1.00 | 36.83 | | N |
| ATOM | 126 | CA | LYS | 16 | 71.072 | 33.346 | −2.073 | 1.00 | 36.83 | | C |
| ATOM | 127 | CB | LYS | 16 | 72.095 | 33.365 | −0.936 | 1.00 | 36.83 | | C |
| ATOM | 128 | CG | LYS | 16 | 73.526 | 33.633 | −1.388 | 1.00 | 36.83 | | C |
| ATOM | 129 | CD | LYS | 16 | 74.077 | 32.499 | −2.259 | 1.00 | 36.83 | | C |
| ATOM | 130 | CE | LYS | 16 | 74.367 | 31.235 | −1.441 | 1.00 | 36.83 | | C |
| ATOM | 131 | NZ | LYS | 16 | 75.023 | 30.172 | −2.258 | 1.00 | 36.83 | | N |
| ATOM | 132 | C | LYS | 16 | 69.696 | 33.033 | −1.507 | 1.00 | 36.83 | | C |
| ATOM | 133 | O | LYS | 16 | 68.883 | 33.928 | −1.267 | 1.00 | 36.83 | | O |
| ATOM | 134 | N | VAL | 17 | 69.430 | 31.748 | −1.306 | 1.00 | 36.83 | | N |
| ATOM | 135 | CA | VAL | 17 | 68.154 | 31.334 | −0.750 | 1.00 | 36.83 | | C |
| ATOM | 136 | CB | VAL | 17 | 67.972 | 29.811 | −0.894 | 1.00 | 36.83 | | C |
| ATOM | 137 | CG1 | VAL | 17 | 66.852 | 29.318 | 0.016 | 1.00 | 36.83 | | C |
| ATOM | 138 | CG2 | VAL | 17 | 67.674 | 29.479 | −2.350 | 1.00 | 36.83 | | C |
| ATOM | 139 | C | VAL | 17 | 68.110 | 31.733 | 0.719 | 1.00 | 36.83 | | C |
| ATOM | 140 | O | VAL | 17 | 69.092 | 31.582 | 1.435 | 1.00 | 36.83 | | O |
| ATOM | 141 | N | LYS | 18 | 66.964 | 32.246 | 1.155 | 1.00 | 36.83 | | N |
| ATOM | 142 | CA | LYS | 18 | 66.783 | 32.676 | 2.535 | 1.00 | 36.83 | | C |
| ATOM | 143 | CB | LYS | 18 | 65.436 | 33.389 | 2.705 | 1.00 | 36.83 | | C |
| ATOM | 144 | CG | LYS | 18 | 65.220 | 34.625 | 1.810 | 1.00 | 36.83 | | C |
| ATOM | 145 | CD | LYS | 18 | 65.595 | 35.925 | 2.535 | 1.00 | 36.83 | | C |
| ATOM | 146 | CE | LYS | 18 | 64.914 | 37.145 | 1.896 | 1.00 | 36.83 | | C |
| ATOM | 147 | NZ | LYS | 18 | 63.408 | 37.146 | 2.060 | 1.00 | 36.83 | | N |
| ATOM | 148 | C | LYS | 18 | 66.824 | 31.494 | 3.496 | 1.00 | 36.83 | | C |
| ATOM | 149 | O | LYS | 18 | 66.438 | 30.378 | 3.141 | 1.00 | 36.83 | | O |
| ATOM | 150 | N | GLN | 19 | 67.293 | 31.761 | 4.714 | 1.00 | 36.83 | | N |
| ATOM | 151 | CA | GLN | 19 | 67.376 | 30.766 | 5.780 | 1.00 | 36.83 | | C |
| ATOM | 152 | CB | GLN | 19 | 68.059 | 31.387 | 6.995 | 1.00 | 36.83 | | C |
| ATOM | 153 | CG | GLN | 19 | 68.183 | 30.476 | 8.200 | 1.00 | 36.83 | | C |
| ATOM | 154 | CD | GLN | 19 | 69.015 | 29.239 | 7.924 | 1.00 | 36.83 | | C |
| ATOM | 155 | OE1 | GLN | 19 | 70.071 | 29.319 | 7.296 | 1.00 | 36.83 | | O |
| ATOM | 156 | NE2 | GLN | 19 | 68.547 | 28.085 | 8.404 | 1.00 | 36.83 | | N |
| ATOM | 157 | C | GLN | 19 | 65.981 | 30.318 | 6.187 | 1.00 | 36.83 | | C |
| ATOM | 158 | O | GLN | 19 | 65.125 | 31.145 | 6.487 | 1.00 | 36.83 | | O |
| ATOM | 159 | N | GLY | 20 | 65.739 | 29.015 | 6.197 | 1.00 | 36.83 | | N |
| ATOM | 160 | CA | GLY | 20 | 64.432 | 28.537 | 6.622 | 1.00 | 36.83 | | C |
| ATOM | 161 | C | GLY | 20 | 64.331 | 28.631 | 8.142 | 1.00 | 36.83 | | C |
| ATOM | 162 | O | GLY | 20 | 65.358 | 28.653 | 8.815 | 1.00 | 36.83 | | O |
| ATOM | 163 | N | ASP | 21 | 63.118 | 28.702 | 8.692 | 1.00 | 36.83 | | N |
| ATOM | 164 | CA | ASP | 21 | 62.968 | 28.775 | 10.143 | 1.00 | 36.83 | | C |
| ATOM | 165 | CB | ASP | 21 | 61.783 | 29.664 | 10.541 | 1.00 | 36.83 | | C |
| ATOM | 166 | CG | ASP | 21 | 60.478 | 29.245 | 9.877 | 1.00 | 36.83 | | C |
| ATOM | 167 | OD1 | ASP | 21 | 60.138 | 28.040 | 9.902 | 1.00 | 36.83 | | O |
| ATOM | 168 | OD2 | ASP | 21 | 59.777 | 30.129 | 9.329 | 1.00 | 36.83 | | O |
| ATOM | 169 | C | ASP | 21 | 62.806 | 27.401 | 10.778 | 1.00 | 36.83 | | C |
| ATOM | 170 | O | ASP | 21 | 62.915 | 26.368 | 10.109 | 1.00 | 36.83 | | O |
| ATOM | 171 | N | SER | 22 | 62.528 | 27.395 | 12.076 | 1.00 | 36.83 | | N |
| ATOM | 172 | CA | SER | 22 | 62.369 | 26.148 | 12.828 | 1.00 | 36.83 | | C |
| ATOM | 173 | CB | SER | 22 | 62.186 | 26.436 | 14.325 | 1.00 | 36.83 | | C |
| ATOM | 174 | OG | SER | 22 | 60.877 | 26.945 | 14.592 | 1.00 | 36.83 | | O |
| ATOM | 175 | C | SER | 22 | 61.192 | 25.320 | 12.345 | 1.00 | 36.83 | | C |
| ATOM | 176 | O | SER | 22 | 61.192 | 24.104 | 12.489 | 1.00 | 36.83 | | O |
| ATOM | 177 | N | ASP | 23 | 60.183 | 25.976 | 11.789 | 1.00 | 36.83 | | N |
| ATOM | 178 | CA | ASP | 23 | 59.011 | 25.258 | 11.309 | 1.00 | 36.83 | | C |
| ATOM | 179 | CB | ASP | 23 | 57.848 | 26.234 | 11.099 | 1.00 | 36.83 | | C |
| ATOM | 180 | CG | ASP | 23 | 57.414 | 26.915 | 12.406 | 1.00 | 36.83 | | C |
| ATOM | 181 | OD1 | ASP | 23 | 57.735 | 28.110 | 12.612 | 1.00 | 36.83 | | O |
| ATOM | 182 | OD2 | ASP | 23 | 56.765 | 26.241 | 13.234 | 1.00 | 36.83 | | O |
| ATOM | 183 | C | ASP | 23 | 59.337 | 24.502 | 10.026 | 1.00 | 36.83 | | C |
| ATOM | 184 | O | ASP | 23 | 58.957 | 23.337 | 9.868 | 1.00 | 36.83 | | O |
| ATOM | 185 | N | LEU | 24 | 60.057 | 25.156 | 9.116 | 1.00 | 36.83 | | N |
| ATOM | 186 | CA | LEU | 24 | 60.455 | 24.513 | 7.869 | 1.00 | 36.83 | | C |
| ATOM | 187 | CB | LEU | 24 | 61.126 | 25.526 | 6.942 | 1.00 | 36.83 | | C |
| ATOM | 188 | CG | LEU | 24 | 61.825 | 25.027 | 5.670 | 1.00 | 36.83 | | C |
| ATOM | 189 | CD1 | LEU | 24 | 60.888 | 24.215 | 4.820 | 1.00 | 36.83 | | C |
| ATOM | 190 | CD2 | LEU | 24 | 62.348 | 26.240 | 4.890 | 1.00 | 36.83 | | C |
| ATOM | 191 | C | LEU | 24 | 61.414 | 23.352 | 8.170 | 1.00 | 36.83 | | C |
| ATOM | 192 | O | LEU | 24 | 61.420 | 22.344 | 7.464 | 1.00 | 36.83 | | O |
| ATOM | 193 | N | PHE | 25 | 62.222 | 23.487 | 9.216 | 1.00 | 36.83 | | N |
| ATOM | 194 | CA | PHE | 25 | 63.148 | 22.414 | 9.579 | 1.00 | 36.83 | | C |
| ATOM | 195 | CB | PHE | 25 | 63.989 | 22.798 | 10.805 | 1.00 | 36.83 | | C |
| ATOM | 196 | CG | PHE | 25 | 64.918 | 21.709 | 11.278 | 1.00 | 36.83 | | C |
| ATOM | 197 | CD1 | PHE | 25 | 64.538 | 20.846 | 12.302 | 1.00 | 36.83 | | C |
| ATOM | 198 | CD2 | PHE | 25 | 66.160 | 21.526 | 10.681 | 1.00 | 36.83 | | C |
| ATOM | 199 | CE1 | PHE | 25 | 65.381 | 19.810 | 12.726 | 1.00 | 36.83 | | C |
| ATOM | 200 | CE2 | PHE | 25 | 67.006 | 20.497 | 11.096 | 1.00 | 36.83 | | C |
| ATOM | 201 | CZ | PHE | 25 | 66.613 | 19.636 | 12.123 | 1.00 | 36.83 | | C |
| ATOM | 202 | C | PHE | 25 | 62.354 | 21.143 | 9.863 | 1.00 | 36.83 | | C |
| ATOM | 203 | O | PHE | 25 | 62.694 | 20.084 | 9.361 | 1.00 | 36.83 | | O |
| ATOM | 204 | N | LYS | 26 | 61.290 | 21.255 | 10.652 | 1.00 | 36.83 | | N |
| ATOM | 205 | CA | LYS | 26 | 60.446 | 20.103 | 10.975 | 1.00 | 36.83 | | C |
| ATOM | 206 | CB | LYS | 26 | 59.250 | 20.524 | 11.838 | 1.00 | 36.83 | | C |
| ATOM | 207 | CG | LYS | 26 | 59.616 | 21.164 | 13.166 | 1.00 | 36.83 | | C |
| ATOM | 208 | CD | LYS | 26 | 58.378 | 21.683 | 13.896 | 1.00 | 36.83 | | C |
| ATOM | 209 | CE | LYS | 26 | 58.724 | 22.260 | 15.277 | 1.00 | 36.83 | | C |
| ATOM | 210 | NZ | LYS | 26 | 59.743 | 23.367 | 15.212 | 1.00 | 36.83 | | N |
| ATOM | 211 | C | LYS | 26 | 59.923 | 19.428 | 9.709 | 1.00 | 36.83 | | C |
| ATOM | 212 | O | LYS | 26 | 59.840 | 18.201 | 9.652 | 1.00 | 36.83 | | O |
| ATOM | 213 | N | LEU | 27 | 59.560 | 20.226 | 8.701 | 1.00 | 36.83 | | N |
| ATOM | 214 | CA | LEU | 27 | 59.045 | 19.679 | 7.437 | 1.00 | 36.83 | | C |
| ATOM | 215 | CB | LEU | 27 | 58.291 | 20.735 | 6.617 | 1.00 | 36.83 | | C |
| ATOM | 216 | CG | LEU | 27 | 57.044 | 21.461 | 7.131 | 1.00 | 36.83 | | C |
| ATOM | 217 | CD1 | LEU | 27 | 56.485 | 22.239 | 5.947 | 1.00 | 36.83 | | C |
| ATOM | 218 | CD2 | LEU | 27 | 55.963 | 20.499 | 7.669 | 1.00 | 36.83 | | C |
| ATOM | 219 | C | LEU | 27 | 60.152 | 19.135 | 6.564 | 1.00 | 36.83 | | C |
| ATOM | 220 | O | LEU | 27 | 59.890 | 18.374 | 5.643 | 1.00 | 36.83 | | O |
| ATOM | 221 | N | THR | 28 | 61.387 | 19.524 | 6.846 | 1.00 | 36.83 | | N |
| ATOM | 222 | CA | THR | 28 | 62.513 | 19.077 | 6.050 | 1.00 | 36.83 | | C |
| ATOM | 223 | CB | THR | 28 | 63.659 | 20.114 | 6.079 | 1.00 | 36.83 | | C |
| ATOM | 224 | OG1 | THR | 28 | 63.135 | 21.408 | 5.789 | 1.00 | 36.83 | | O |
| ATOM | 225 | CG2 | THR | 28 | 64.726 | 19.772 | 5.054 | 1.00 | 36.83 | | C |
| ATOM | 226 | C | THR | 28 | 63.054 | 17.727 | 6.505 | 1.00 | 36.83 | | C |
| ATOM | 227 | O | THR | 28 | 63.621 | 16.995 | 5.696 | 1.0CG2 | THR | 28 | O |
| ATOM | 228 | N | VAL | 29 | 62.878 | 17.394 | 7.787 | 1.0CG2 | THR | 28 | N |
| ATOM | 229 | CA | VAL | 29 | 63.372 | 16.118 | 8.31R | 1.0CG2 | THR | 28 | C |
| ATOM | 230 | CB | VAL | 29 | 63.974 | 16.254 | 9.749 | 1.0CG2 | THR | 28 | C |
| ATOM | 231 | CG1 | VAL | 29 | 65.13R | 17.242 | 9.749 | 1.0CG2 | THR | 28 | C |
| ATOM | 232 | CG2 | VAL | 29 | 62.902 | 16.684 | 10.730 | 1.0CG2 | THR | 28 | C |
| ATOM | 23R | C | VAL | 29 | 62.282 | 15.057 | 8.357 | 1.0CG2 | THR | 28 | C |
| ATOM | 234 | O | VAL | 29 | 62.510 | 13.94R | 8.799 | 1.0CG2 | THR | 28 | O |
| ATOM | 235 | N | SER | 30 | 61.091 | 15.409 | 7.909 | 1.0CG2 | THR | 28 | N |
| ATOM | 236 | CA | SER | 30 | 59.979 | 14.46R | 7.89R | 1.0CG2 | THR | 28 | C |
| ATOM | 237 | CB | SER | 30 | 58.746 | 15.146 | 7.298 | 1.0CG2 | THR | 28 | C |
| ATOM | 238 | OG | SER | 30 | 57.735 | 14.216 | 6.984 | 1.0CG2 | THR | 28 | O |
| ATOM | 239 | C | SER | 30 | 60.338 | 13.219 | 7.065 | 1.0CG2 | THR | 28 | C |
| ATOM | 240 | O | SER | 30 | 61.240 | 13.257 | 6.230 | 1.0CG2 | THR | 28 | O |
| ATOM | 241 | N | ASP | 31 | 59.627 | 12.121 | 7.296 | 1.0CG2 | THR | 28 | N |
| ATOM | 242 | CA | ASP | 31 | 59.879 | 10.89R | 6.550 | 1.0CG2 | THR | 28 | C |
| ATOM | 24R | CB | ASP | 31 | 60.039 | 9.710 | 7.51R | 1.0CG2 | THR | 28 | C |
| ATOM | 244 | CG | ASP | 31 | 61.329 | 9.800 | 8.337 | 1.0CG2 | THR | 28 | C |
| ATOM | 245 | OD1 | ASP | 31 | 61.252 | 10.144 | 9.545 | 1.0CG2 | THR | 28 | O |
| ATOM | 246 | OD2 | ASP | 31 | 62.429 | 9.546 | 7.767 | 1.0CG2 | THR | 28 | O |
| ATOM | 247 | C | ASP | 31 | 58.788 | 10.60R | 5.519 | 1.0CG2 | THR | 28 | C |
| ATOM | 248 | O | ASP | 31 | 58.854 | 9.607 | 4.796 | 1.0CG2 | THR | 28 | O |
| ATOM | 249 | N | LYS | 32 | 57.791 | 11.481 | 5.44R | 1.0CG2 | THR | 28 | N |
| ATOM | 250 | CA | LYS | 32 | 56.714 | 11.30R | 4.47R | 1.0CG2 | THR | 28 | C |
| ATOM | 251 | CB | LYS | 32 | 55.565 | 12.275 | 4.758 | 1.0CG2 | THR | 28 | C |
| ATOM | 252 | CG | LYS | 32 | 54.854 | 12.108 | 6.105 | 1.0CG2 | THR | 28 | C |
| ATOM | 25R | CD | LYS | 32 | 53.701 | 13.111 | 6.217 | 1.0CG2 | THR | 28 | C |
| ATOM | 254 | CE | LYS | 32 | 53.11R | 13.162 | 7.629 | 1.0CG2 | THR | 28 | C |
| ATOM | 255 | NZ | LYS | 32 | 52.516 | 11.869 | 8.068 | 1.0CG2 | THR | 28 | N |
| ATOM | 256 | C | LYS | 32 | 57.237 | 11.565 | 3.055 | 1.0CG2 | THR | 28 | C |
| ATOM | 257 | O | LYS | 32 | 58.290 | 12.177 | 2.882 | 1.0CG2 | THR | 28 | O |
| ATOM | 258 | N | ARG | 3R | 2856.4957 | 11.0957 | 2.050 | 1.0CG2 | THR | 28 | N |
| ATOM | 259 | CA | ARG | 3R | 2856.87R | 11.304 | 280.652 | 1.0CG2 | THR | 28 | C |
| ATOM | 260 | CB | ARG | 3R | 2857.332 | 9.99R | 0.018 | 1.0CG2 | THR | 28 | C |
| ATOM | 261 | CG | ARG | 3R | 2858.4957 | 9.348 | 0.717 | 1.0CG2 | THR | 28 | C |
| ATOM | 262 | CD | ARG | 3R | 2858.354 | 287THRR | 0.645 | 1.0CG2 | THR | 28 | C |
| ATOM | 26R | NE | ARG | 3R | 2858.370 | 7.377 | −0.735 | 1.0CG2 | THR | 28 | N |
| ATOM | 264 | CZ | ARG | 3R | 2859.485 | 7.097 | −1.397 | 1.0CG2 | THR | 28 | C |
| ATOM | 265 | NH1 | ARG | 3R | 2860.657 | 7.224 | −0.782 | 1.0CG2 | THR | 28 | N |
| ATOM | 266 | NH2 | ARG | 3R | 2859.435 | 6.71R | −2.668 | 1.0CG2 | THR | 28 | N |
| ATOM | 267 | C | ARG | 3R | 2855.671 | 11.866 | −0.11R | 1.0CG2 | THR | 28 | C |
| ATOM | 268 | O | ARG | 3R | 2854.524 | 11.5HR | 0.237 | 1.0CG2 | THR | 28 | O |
| ATOM | 269 | N | TYR | 34 | 55.940 | 12.657 | −1.149 | 1.0CG2 | THR | 28 | N |
| ATOM | 270 | CA | TYR | 34 | 54.882 | 13.282 | −1.930 | 1.0CG2 | THR | 28 | C |
| ATOM | 271 | CB | TYR | 34 | 54.805 | 14.775 | −1.603 | 1.0CG2 | THR | 28 | C |
| ATOM | 272 | CG | TYR | 34 | 54.590 | 15.090 | −0.136 | 1.0CG2 | THR | 28 | C |
| ATOM | 27R | CD1 | TYR | 34 | 55.638 | 14.990 | 0.786 | 1.0CG2 | THR | 28 | C |
| ATOM | 274 | CE1 | TYR | 34 | 55.435 | 15.258 | 2.141 | 1.0CG2 | THR | 28 | C |
| ATOM | 275 | CD2 | TYR | 34 | 53.338 | 15.466 | 0.33R | 1.0CG2 | THR | 28 | C |
| ATOM | 276 | CE2 | TYR | 34 | 53.128 | 15.73R | 1.685 | 1.0CG2 | THR | 28 | C |
| ATOM | 277 | CZ | TYR | 34 | 54.178 | 15.625 | 2.578 | 1.0CG2 | THR | 28 | C |
| ATOM | 278 | OH | TYR | 34 | 53.956 | 15.85R | 3.914 | 1.0CG2 | THR | 28 | O |
| ATOM | 279 | C | TYR | 34 | 55.01R | 13.109 | −3.445 | 1.0CG2 | THR | 28 | C |
| ATOM | 280 | O | TYR | 34 | 56.078 | 12.784 | −3.965 | 1.0CG2 | THR | 28 | O |
| ATOM | 281 | N | ILE | 35 | 53.911 | 13.352 | −4.146 | 1.0CG2 | THR | 28 | N |
| ATOM | 282 | CA | ILE | 35 | 53.867 | 13.204 | −5.592 | 1.0CG2 | THR | 28 | C |
| ATOM | 28R | CB | ILE | 35 | 53.11R | 11.908 | −5.981 | 1.0CG2 | THR | 28 | C |
| ATOM | 284 | CG2 | ILE | 35 | 51.64R | 12.046 | −5.644 | 1.0CG2 | THR | 28 | C |
| ATOM | 285 | CG1 | ILE | 35 | 53.284 | 11.614 | −7.468 | 1.0CG2 | THR | 28 | C |
| ATOM | 286 | CD1 | ILE | 35 | 52.581 | 10.33R | −7.917 | 1.0CG2 | THR | 28 | C |
| ATOM | 287 | C | ILE | 35 | 53.150 | 14.384 | −6.231 | 1.0CG2 | THR | 28 | C |
| ATOM | 288 | O | ILE | 35 | 52.212 | 14.932 | −5.649 | 1.0CG2 | THR | 28 | O |
| ATOM | 289 | N | TRP | 36 | 53.598 | 14.779 | −7.420 | 1.0CG2 | THR | 28 | N |
| ATOM | 290 | CA | TRP | 36 | 52.960 | 15.877 | −8.137 | 1.0CG2 | THR | 28 | C |
| ATOM | 291 | CB | TRP | 36 | 53.968 | 16.655 | −8.989 | 1.0CG2 | THR | 28 | C |
| ATOM | 292 | CG | TRP | 36 | 54.920 | 17.507 | −8.224 | 1.0CG2 | THR | 28 | C |
| ATOM | 29R | CD2 | TRP | 36 | 54.616 | 18.698 | −7.477 | 1.0CG2 | THR | 28 | C |
| ATOM | 294 | CE2 | TRP | 36 | 55.828 | 19.169 | −6.932 | 1.0CG2 | THR | 28 | C |
| ATOM | 295 | CE3 | TRP | 36 | 53.438 | 19.409 | −7.215 | 1.0CG2 | THR | 28 | C |
| ATOM | 296 | CD1 | TRP | 36 | 56.264 | 17.317 | −8.105 | 1.0CG2 | THR | 28 | C |
| ATOM | 297 | NE1 | TRP | 36 | 56.818 | 18.311 | −7.33R | 1.0CG2 | THR | 28 | N |
| ATOM | 298 | CZ2 | TRP | 36 | 55.899 | 20.322 | −6.132 | 1.0CG2 | THR | 28 | C |
| ATOM | 299 | CZ3 | TRP | 36 | 53.507 | 20.556 | −6.419 | 1.0CG2 | THR | 28 | C |
| ATOM | 30CG | CH2 | TRP | 36 | 54.731 | 20.998 | −5.887 | 1.0CG2 | THR | 28 | C |
| ATOM | 301 | C | TRP | 36 | 51.937 | 15.231 | −9.049 | 1.0CG2 | THR | 28 | C |
| ATOM | 302 | O | TRP | 36 | 52.262 | 14.287 | −9.771 | 1.0CG2 | THR | 28 | O |
| ATOM | 30R | N | TYR | 37 | 50.699 | 15.717 | −9.012 | 1.0CG2 | THR | 28 | N |
| ATOM | 304 | CA | TYR | 37 | 49.648 | 15.164 | −9.868 | 1.0CG2 | THR | 28 | C |
| ATOM | 305 | CB | TYR | 37 | 48.792 | 14.18CG | −9.072 | 1.0CG2 | THR | 28 | C |
| ATOM | 306 | CG | TYR | 37 | 47.94CG | 14.852 | −8.024G | 1.0CG2 | THR | 28 | C |
| ATOM | 307 | CD1 | TYR | 37 | 48.492 | 15.305 | −6THR1 | 1.0CG2 | THR | 28 | C |
| ATOM | 308 | CE1 | TYR | 37 | 47.727 | 16.019 | −5.911 | 1.0CG2 | THR | 28 | C |
| ATOM | 309 | CD2 | TYR | 37 | 46.597 | 15.12CG | −8.267 | 1.0CG2 | THR | 28 | C |
| ATOM | 31CG | CE2 | TYR | 37 | 45THR1 | 15TH29 | −7.36R | 1.0CG2 | THR | 28 | C |
| ATOM | 311 | CZ | TYR | 37 | 46.397 | 16.281 | −6T190 | 1.0CG2 | THR | 28 | C |
| ATOM | 312 | OH | TYR | 37 | 45T632 | 17.019 | −5.315 | 1.0CG2 | THR | 28 | O |
| ATOM | 31R | C | TYR | 37 | 48.77R | 16.30CG | −10.406 | 1.0CG2 | THR | 28 | C |
| ATOM | 314 | O | TYR | 37 | 48.878 | 17.43R | −9.944 | 1.0CG2 | THR | 28 | O |
| ATOM | 315 | N | ASN | 38 | 47.909 | 15.994G | −11.374 | 1.0CG2 | THR | 28 | N |
| ATOM | 316 | CA | ASN | 38 | 47.008 | 16.992 | −11.962 | 1.00G2 | THR | 28 | C |
| ATOM | 317 | CB | ASN | 38 | 46.997 | 16.872 | −13.496 | 1.00G2 | THR | 28 | C |
| ATOM | 318 | CG | ASN | 38 | 48.36R | 17.095 | −14.124 | 1.00G2 | THR | 28 | C |
| ATOM | 319 | OD1 | ASN | 38 | 48.946 | 18.169 | −14.01R | 1.00G2 | THR | 28 | O |
| ATOM | 320 | ND2 | ASN | 38 | 48.869 | 16.085 | −14.79R | 1.00G2 | THR | 28 | N |
| ATOM | 321 | C | ASN | 38 | 45.570 | 16.796 | −11.449 | 1.00G2 | THR | 28 | C |
| ATOM | 322 | O | ASN | 38 | 44.939 | 15.7HR | −11.737 | 1.00G2 | THR | 28 | O |
| ATOM | 32R | N | PRO | 39 | 45.039 | 17.762 | −10.680 | 1.00G2 | THR | 28 | N |
| ATOM | 324 | CD | PRO | 39 | 45.695 | 18.976 | −10.158 | 1.00G2 | THR | 28 | C |
| ATOM | 325 | CA | PRO | 39 | 43.672 | 17.649 | −10.158 | 1.00G2 | THR | 28 | C |
| ATOM | 326 | CB | PRO | 39 | 43.469 | 18.977 | −9.420 | 1.00G2 | THR | 28 | C |
| ATOM | 327 | CG | PRO | 39 | 44.850 | 19.29R | −8.925 | 1.00G2 | THR | 28 | C |
| ATOM | 328 | C | PRO | 39 | 42.685 | 17.486 | −11.304 | 1.00G2 | THR | 28 | C |
| ATOM | 329 | O | PRO | 39 | 41.777 | 16.659 | −11.256 | 1.00G2 | THR | 28 | O |
| ATOM | 330 | N | ASP | 40 | 42.888 | 18.29CG | −12.337 | 1.00G2 | THR | 28 | N |
| ATOM | 331 | CA | ASP | 40 | 42.046 | 18.278G | −13.516 | 1.00G2 | THR | 28 | C |
| ATOM | 332 | CB | ASP | 40 | 41.660 | 19.711G | −13.885 | 1.00G2 | THR | 28 | C |
| ATOM | 33R | CG | ASP | 40 | 40.686 | 19.776 | −15.058 | 1.00G2 | THR | 28 | C |
| ATOM | 334 | OD1 | ASP | 40 | 40.760 | 18.904 | −15.957 | 1.00G2 | THR | 28 | O |
| ATOM | 335 | OD2 | ASP | 40 | 39.859 | 20.719 | −15.076 | 1.00G2 | THR | 28 | O |
| ATOM | 336 | C | ASP | 40 | 42.82R | 17.639 | −14.668 | 1.00G2 | THR | 28 | C |
| ATOM | 337 | O | ASP | 40 | 43.466 | 18.334 | −15.450 | 1.00G2 | THR | 28 | O |
| ATOM | 338 | N | PRO | 41 | 42.752 | 16.303 | −14.79R | 1.00G2 | THR | 28 | N |
| ATOM | 339 | CD | PRO | 41 | 41.960 | 15.418G | −13.915 | 1.00G2 | THR | 28 | C |
| ATOM | 340 | CA | PRO | 41 | 43.437 | 15.527G | −15THR5 | 1.00G2 | THR | 28 | C |
| ATOM | 341 | CB | PRO | 41 | 42.75R | 14.168 | −15T749 | 1.00G2 | THR | 28 | C |
| ATOM | 342 | CG | PRO | 41 | 42.504 | 14.036 | −14.252 | 1.00G2 | THR | 28 | C |
| ATOM | 34R | C | PRO | 41 | 43.416 | 16.114 | −17.241 | 1.00G2 | THR | 28 | C |
| ATOM | 344 | O | PRO | 41 | 44.167 | 15.664 | −18.111 | 1.00G2 | THR | 28 | O |
| ATOM | 345 | N | LYS | 42 | 42.562 | 17.107G | −17.477 | 1.00G2 | THR | 28 | N |
| ATOM | 346 | CA | LYS | 42 | 42.511 | 17.735G | −18.797 | 1.00G2 | THR | 28 | C |
| ATOM | 347 | CB | LYS | 42 | 41.132 | 18.346 | −19.066 | 1.00G2 | THR | 28 | C |
| ATOM | 348 | CG | LYS | 42 | 40.048 | 17.299 | −19.10R | 1.00G2 | THR | 28 | C |
| ATOM | 349 | CD | LYS | 42 | 38.761 | 17.771G | −19.72R | 1.00G2 | THR | 28 | C |
| ATOM | 350 | CE | LYS | 42 | 37.785 | 16.585 | −19.790 | 1.00G2 | THR | 28 | C |
| ATOM | 351 | NZ | LYS | 42 | 37.594 | 15.949 | −18.442 | 1.00G2 | THR | 28 | N |
| ATOM | 352 | C | LYS | 42 | 43.584 | 18.813 | −18.864 | 1.00G2 | THR | 28 | C |
| ATOM | 35R | O | LYS | 42 | 44.116 | 19.105 | −19.942 | 1.00G2 | THR | 28 | O |
| ATOM | 354 | N | GLU | 4R | 2843.895 | 19.392 | −17.70R | 1.00G2 | THR | 28 | N |
| ATOM | 355 | CA | GLU | 4R | 2844.916 | 20.426 | −17.582 | 1.00G2 | THR | 28 | C |
| ATOM | 356 | CB | GLU | 4R | 2844.478 | 21.472 | −16.558 | 1.00G2 | THR | 28 | C |
| ATOM | 357 | CG | GLU | 4R | 2843.541 | 22.505 | −17.152 | 1.00G2 | THR | 28 | C |
| ATOM | 358 | CD | GLU | 43 | 42.546 | 23.041 | −16.142 | 1.00 | 36.83 | | C |
| ATOM | 359 | OE1 | GLU | 43 | 42.982 | 23.604 | −15.106 | 1.00 | 36.83 | | O |
| ATOM | 360 | OE2 | GLU | 43 | 41.323 | 22.893 | −16.391 | 1.00 | 36.83 | | O |
| ATOM | 361 | C | GLU | 43 | 46.240 | 19.791 | −17.162 | 1.00 | 36.83 | | C |
| ATOM | 362 | O | GLU | 43 | 46.583 | 19.747 | −15.974 | 1.00 | 36.83 | | O |
| ATOM | 363 | N | ARG | 44 | 46.977 | 19.304 | −18.154 | 1.00 | 36.83 | | N |
| ATOM | 364 | CA | ARG | 44 | 48.263 | 18.647 | −17.929 | 1.00 | 36.83 | | C |
| ATOM | 365 | CB | ARG | 44 | 48.902 | 18.239 | −19.274 | 1.00 | 36.83 | | C |
| ATOM | 366 | CG | ARG | 44 | 48.144 | 17.183 | −20.097 | 1.00 | 36.83 | | C |
| ATOM | 367 | CD | ARG | 44 | 46.674 | 17.554 | −20.343 | 1.00 | 36.83 | | C |
| ATOM | 368 | NE | ARG | 44 | 46.472 | 18.772 | −21.141 | 1.00 | 36.83 | | N |
| ATOM | 369 | CZ | ARG | 44 | 46.410 | 18.808 | −22.474 | 1.00 | 36.83 | | C |
| ATOM | 370 | NH1 | ARG | 44 | 46.541 | 17.685 | −23.183 | 1.00 | 36.83 | | N |
| ATOM | 371 | NH2 | ARG | 44 | 46.192 | 19.966 | −23.103 | 1.00 | 36.83 | | N |
| ATOM | 372 | C | ARG | 44 | 49.282 | 19.477 | −17.143 | 1.00 | 36.83 | | C |
| ATOM | 373 | O | ARG | 44 | 50.054 | 18.923 | −16.367 | 1.00 | 36.83 | | O |
| ATOM | 374 | N | ASP | 45 | 49.288 | 20.793 | −17.322 | 1.00 | 36.83 | | N |
| ATOM | 375 | CA | ASP | 45 | 50.292 | 21.599 | −16.626 | 1.00 | 36.83 | | C |
| ATOM | 376 | CB | ASP | 45 | 50.797 | 22.711 | −17.548 | 1.00 | 36.83 | | C |
| ATOM | 377 | CG | ASP | 45 | 51.592 | 22.165 | −18.724 | 1.00 | 36.83 | | C |
| ATOM | 378 | OD1 | ASP | 45 | 52.490 | 21.320 | −18.498 | 1.00 | 36.83 | | O |
| ATOM | 379 | OD2 | ASP | 45 | 51.326 | 22.572 | −19.870 | 1.00 | 36.83 | | O |
| ATOM | 380 | C | ASP | 45 | 49.984 | 22.166 | −15.250 | 1.00 | 36.83 | | C |
| ATOM | 381 | O | ASP | 45 | 50.844 | 22.781 | −14.627 | 1.00 | 36.83 | | O |
| ATOM | 382 | N | SER | 46 | 48.774 | 21.958 | −14.760 | 1.00 | 36.83 | | N |
| ATOM | 383 | CA | SER | 46 | 48.429 | 22.439 | −13.433 | 1.00 | 36.83 | | C |
| ATOM | 384 | CB | SER | 46 | 46.950 | 22.776 | −13.345 | 1.00 | 36.83 | | C |
| ATOM | 385 | OG | SER | 46 | 46.643 | 23.196 | −12.032 | 1.00 | 36.83 | | O |
| ATOM | 386 | C | SER | 46 | 48.757 | 21.276 | −12.505 | 1.00 | 36.83 | | C |
| ATOM | 387 | O | SER | 46 | 48.253 | 20.169 | −12.701 | 1.00 | 36.83 | | O |
| ATOM | 388 | N | TYR | 47 | 49.604 | 21.525 | −11.504 | 1.00 | 36.83 | | N |
| ATOM | 389 | CA | TYR | 47 | 50.028 | 20.480 | −10.582 | 1.00 | 36.83 | | C |
| ATOM | 390 | CB | TYR | 47 | 51.538 | 20.241 | −10.700 | 1.00 | 36.83 | | C |
| ATOM | 391 | CG | TYR | 47 | 51.950 | 19.518 | −11.957 | 1.00 | 36.83 | | C |
| ATOM | 392 | CD1 | TYR | 47 | 51.916 | 18.126 | −12.025 | 1.00 | 36.83 | | C |
| ATOM | 393 | CE1 | TYR | 47 | 52.250 | 17.462 | −13.187 | 1.00 | 36.83 | | C |
| ATOM | 394 | CD2 | TYR | 47 | 52.333 | 20.224 | −13.089 | 1.00 | 36.83 | | C |
| ATOM | 395 | CE2 | TYR | 47 | 52.664 | 19.574 | −14.253 | 1.00 | 36.83 | | C |
| ATOM | 396 | CZ | TYR | 47 | 52.620 | 18.195 | −14.295 | 1.00 | 36.83 | | C |
| ATOM | 397 | OH | TYR | 47 | 52.935 | 17.551 | −15.456 | 1.00 | 36.83 | | O |
| ATOM | 398 | C | TYR | 47 | 49.713 | 20.780 | −9.146 | 1.00 | 36.83 | | C |
| ATOM | 399 | O | TYR | 47 | 49.826 | 21.915 | −8.694 | 1.00 | 36.83 | | O |
| ATOM | 400 | N | GLU | 48 | 49.320 | 19.741 | −8.424 | 1.00 | 36.83 | | N |
| ATOM | 401 | CA | GLU | 48 | 49.018 | 19.880 | −7.012 | 1.00 | 36.83 | | C |
| ATOM | 402 | CB | GLU | 48 | 47.544 | 19.578 | −6.752 | 1.00 | 36.83 | | C |
| ATOM | 403 | CG | GLU | 48 | 47.144 | 19.915 | −5.347 | 1.00 | 36.83 | | C |
| ATOM | 404 | CD | GLU | 48 | 47.430 | 21.370 | −5.011 | 1.00 | 36.83 | | C |
| ATOM | 405 | OE1 | GLU | 48 | 46.559 | 22.233 | −5.313 | 1.00 | 36.83 | | O |
| ATOM | 406 | OE2 | GLU | 48 | 48.530 | 21.643 | −4.461 | 1.00 | 36.83 | | O |
| ATOM | 407 | C | GLU | 48 | 49.924 | 18.880 | −6.287 | 1.00 | 36.83 | | C |
| ATOM | 408 | O | GLU | 48 | 50.539 | 18.028 | −6.930 | 1.00 | 36.83 | | O |
| ATOM | 409 | N | CYS | 49 | 50.027 | 18.988 | −4.967 | 1.00 | 36.83 | | N |
| ATOM | 410 | CA | CYS | 49 | 50.892 | 18.077 | −4.226 | 1.00 | 36.83 | | C |
| ATOM | 411 | CB | CYS | 49 | 51.881 | 18.876 | −3.367 | 1.00 | 36.83 | | C |
| ATOM | 412 | SG | CYS | 49 | 53.037 | 17.882 | −2.388 | 1.00 | 36.83 | | S |
| ATOM | 413 | C | CYS | 49 | 50.082 | 17.118 | −3.360 | 1.00 | 36.83 | | C |
| ATOM | 414 | O | CYS | 49 | 49.276 | 17.544 | −2.543 | 1.00 | 36.83 | | O |
| ATOM | 415 | N | GLY | 50 | 50.294 | 15.816 | −3.551 | 1.00 | 36.83 | | N |
| ATOM | 416 | CA | GLY | 50 | 49.572 | 14.823 | −2.770 | 1.00 | 36.83 | | C |
| ATOM | 417 | C | GLY | 50 | 50.504 | 13.930 | −1.965 | 1.00 | 36.83 | | C |
| ATOM | 418 | O | GLY | 50 | 51.619 | 13.619 | −2.397 | 1.00 | 36.83 | | O |
| ATOM | 419 | N | GLU | 51 | 50.059 | 13.513 | −0.785 | 1.00 | 36.83 | | N |
| ATOM | 420 | CA | GLU | 51 | 50.891 | 12.658 | 0.047 | 1.00 | 36.83 | | C |
| ATOM | 421 | CB | GLU | 51 | 50.540 | 12.836 | 1.530 | 1.00 | 36.83 | | C |
| ATOM | 422 | CG | GLU | 51 | 51.304 | 11.891 | 2.451 | 1.00 | 36.83 | | C |
| ATOM | 423 | CD | GLU | 51 | 51.060 | 12.163 | 3.928 | 1.00 | 36.83 | | C |
| ATOM | 424 | OE1 | GLU | 51 | 51.547 | 11.371 | 4.774 | 1.00 | 36.83 | | O |
| ATOM | 425 | OE2 | GLU | 51 | 50.384 | 13.170 | 4.244 | 1.00 | 36.83 | | O |
| ATOM | 426 | C | GLU | 51 | 50.743 | 11.188 | −0.338 | 1.00 | 36.83 | | C |
| ATOM | 427 | O | GLU | 51 | 49.638 | 10.702 | −0.574 | 1.00 | 36.83 | | O |
| ATOM | 428 | N | ILE | 52 | 51.865 | 10.488 | −0.426 | 1.00 | 36.83 | | N |
| ATOM | 429 | CA | ILE | 52 | 51.820 | 9.068 | −0.738 | 1.00 | 36.83 | | C |
| ATOM | 430 | CB | ILE | 52 | 53.169 | 8.546 | −1.213 | 1.00 | 36.83 | | C |
| ATOM | 431 | CG2 | ILE | 52 | 53.147 | 7.022 | −1.254 | 1.00 | 36.83 | | C |
| ATOM | 432 | CG1 | ILE | 52 | 53.479 | 9.117 | −2.598 | 1.00 | 36.83 | | C |
| ATOM | 433 | CD1 | ILE | 52 | 54.809 | 8.658 | −3.161 | 1.00 | 36.83 | | C |
| ATOM | 434 | C | ILE | 52 | 51.421 | 8.317 | 0.525 | 1.00 | 36.83 | | C |
| ATOM | 435 | O | ILE | 52 | 52.185 | 8.254 | 1.485 | 1.00 | 36.83 | | O |
| ATOM | 436 | N | VAL | 53 | 50.215 | 7.761 | 0.521 | 1.00 | 36.83 | | N |
| ATOM | 437 | CA | VAL | 53 | 49.708 | 7.016 | 1.669 | 1.00 | 36.83 | | C |
| ATOM | 438 | CB | VAL | 53 | 48.169 | 7.082 | 1.736 | 1.00 | 36.83 | | C |
| ATOM | 439 | CG1 | VAL | 53 | 47.720 | 8.531 | 1.782 | 1.00 | 36.83 | | C |
| ATOM | 440 | CG2 | VAL | 53 | 47.559 | 6.378 | 0.538 | 1.00 | 36.83 | | C |
| ATOM | 441 | C | VAL | 53 | 50.125 | 5.541 | 1.677 | 1.00 | 36.83 | | C |
| ATOM | 442 | O | VAL | 53 | 50.265 | 4.945 | 2.736 | 1.00 | 36.83 | | O |
| ATOM | 443 | N | SER | 54 | 50.331 | 4.951 | 0.505 | 1.00 | 36.83 | | N |
| ATOM | 444 | CA | SER | 54 | 50.722 | 3.547 | 0.441 | 1.00 | 36.83 | | C |
| ATOM | 445 | CB | SER | 54 | 49.515 | 2.665 | 0.711 | 1.00 | 36.83 | | C |
| ATOM | 446 | OG | SER | 54 | 48.657 | 2.695 | −0.414 | 1.00 | 36.83 | | O |
| ATOM | 447 | C | SER | 54 | 51.288 | 3.174 | −0.919 | 1.00 | 36.83 | | C |
| ATOM | 448 | O | SER | 54 | 51.346 | 3.999 | −1.842 | 1.00 | 36.83 | | O |
| ATOM | 449 | N | GLU | 55 | 51.700 | 1.918 | −1.059 | 1.00 | 36.83 | | N |
| ATOM | 450 | CA | GLU | 55 | 52.241 | 1.482 | −2.331 | 1.00 | 36.83 | | C |
| ATOM | 451 | CB | GLU | 55 | 53.658 | 2.029 | −2.505 | 1.00 | 36.83 | | C |
| ATOM | 452 | CG | GLU | 55 | 54.770 | 1.122 | −2.038 | 1.00 | 36.83 | | C |
| ATOM | 453 | CD | GLU | 55 | 56.053 | 1.877 | −1.846 | 1.00 | 36.83 | | C |
| ATOM | 454 | OE1 | GLU | 55 | 56.241 | 2.451 | −0.757 | 1.00 | 36.83 | | O |
| ATOM | 455 | OE2 | GLU | 55 | 56.873 | 1.921 | −2.785 | 1.00 | 36.83 | | O |
| ATOM | 456 | C | GLU | 55 | 52.248 | −0.029 | −2.510 | 1.00 | 36.83 | | C |
| ATOM | 457 | O | GLU | 55 | 52.349 | −0.788 | −1.545 | 1.00 | 36.83 | | O |
| ATOM | 458 | N | THR | 56 | 52.112 | −0.450 | −3.760 | 1.00 | 36.83 | | N |
| ATOM | 459 | CA | THR | 56 | 52.150 | −1.861 | −4.097 | 1.00 | 36.83 | | C |
| ATOM | 460 | CB | THR | 56 | 51.040 | −2.253 | −5.088 | 1.00 | 36.83 | | C |
| ATOM | 461 | OG1 | THR | 56 | 51.226 | −1.530 | −6.312 | 1.00 | 36.83 | | O |
| ATOM | 462 | CG2 | THR | 56 | 49.663 | −1.924 | −4.523 | 1.00 | 36.83 | | C |
| ATOM | 463 | C | THR | 56 | 53.483 | −2.011 | −4.795 | 1.00 | 36.83 | | C |
| ATOM | 464 | O | THR | 56 | 54.333 | −1.113 | −4.748 | 1.00 | 36.83 | | O |
| ATOM | 465 | N | SER | 57 | 53.659 | −3.138 | −5.462 | 1.00 | 36.83 | | N |
| ATOM | 466 | CA | SER | 57 | 54.901 | −3.415 | −6.180 | 1.00 | 36.83 | | C |
| ATOM | 467 | CB | SER | 57 | 54.908 | −4.872 | −6.630 | 1.00 | 36.83 | | C |
| ATOM | 468 | OG | SER | 57 | 56.205 | −5.254 | −7.036 | 1.00 | 36.83 | | O |
| ATOM | 469 | C | SER | 57 | 55.112 | −2.513 | −7.403 | 1.00 | 36.83 | | C |
| ATOM | 470 | O | SER | 57 | 56.244 | −2.190 | −7.746 | 1.00 | 36.83 | | O |
| ATOM | 471 | N | ASP | 58 | 54.027 | −2.122 | −8.067 | 1.00 | 36.83 | | N |
| ATOM | 472 | CA | ASP | 58 | 54.145 | −1.276 | −9.257 | 1.00 | 36.83 | | C |
| ATOM | 473 | CB | ASP | 58 | 53.771 | −2.069 | −10.524 | 1.00 | 36.83 | | C |
| ATOM | 474 | CG | ASP | 58 | 52.272 | −2.337 | −10.631 | 1.00 | 36.83 | | C |
| ATOM | 475 | OD1 | ASP | 58 | 51.501 | −1.715 | −9.877 | 1.00 | 36.83 | | O |
| ATOM | 476 | OD2 | ASP | 58 | 51.850 | −3.161 | −11.478 | 1.00 | 36.83 | | O |
| ATOM | 477 | C | ASP | 58 | 53.285 | −0.022 | −9.216 | 1.00 | 36.83 | | C |
| ATOM | 478 | O | ASP | 58 | 52.963 | 0.527 | −10.262 | 1.00 | 36.83 | | O |
| ATOM | 479 | N | SER | 59 | 52.883 | 0.429 | −8.037 | 1.00 | 36.83 | | N |
| ATOM | 480 | CA | SER | 59 | 52.044 | 1.619 | −7.988 | 1.00 | 36.83 | | C |
| ATOM | 481 | CB | SER | 59 | 50.595 | 1.266 | −8.339 | 1.00 | 36.83 | | C |
| ATOM | 482 | OG | SER | 59 | 50.020 | 0.426 | −7.350 | 1.00 | 36.83 | | O |
| ATOM | 483 | C | SER | 59 | 52.071 | 2.350 | −6.663 | 1.00 | 36.83 | | C |
| ATOM | 484 | O | SER | 59 | 52.517 | 1.826 | −5.642 | 1.00 | 36.83 | | O |
| ATOM | 485 | N | PHE | 60 | 51.599 | 3.586 | −6.710 | 1.00 | 36.83 | | N |
| ATOM | 486 | CA | PHE | 60 | 51.543 | 4.454 | −5.547 | 1.00 | 36.83 | | C |
| ATOM | 487 | CB | PHE | 60 | 52.364 | 5.736 | −5.758 | 1.00 | 36.83 | | C |
| ATOM | 488 | CG | PHE | 60 | 53.839 | 5.591 | −5.529 | 1.00 | 36.83 | | C |
| ATOM | 489 | CD1 | PHE | 60 | 54.331 | 5.121 | −4.320 | 1.00 | 36.83 | | C |
| ATOM | 490 | CD2 | PHE | 60 | 54.740 | 6.020 | −6.494 | 1.00 | 36.83 | | C |
| ATOM | 491 | CE1 | PHE | 60 | 55.701 | 5.084 | −4.075 | 1.00 | 36.83 | | C |
| ATOM | 492 | CE2 | PHE | 60 | 56.107 | 5.990 | −6.262 | 1.00 | 36.83 | | C |
| ATOM | 493 | CZ | PHE | 60 | 56.589 | 5.523 | −5.055 | 1.00 | 36.83 | | C |
| ATOM | 494 | C | PHE | 60 | 50.108 | 4.886 | −5.388 | 1.00 | 36.83 | | C |
| ATOM | 495 | O | PHE | 60 | 49.386 | 5.044 | −6.369 | 1.00 | 36.83 | | O |
| ATOM | 496 | N | THR | 61 | 49.704 | 5.073 | −4.143 | 1.00 | 36.83 | | N |
| ATOM | 497 | CA | THR | 61 | 48.377 | 5.560 | −3.837 | 1.00 | 36.83 | | C |
| ATOM | 498 | CB | THR | 61 | 47.573 | 4.538 | −3.029 | 1.00 | 36.83 | | C |
| ATOM | 499 | OG1 | THR | 61 | 47.180 | 3.469 | −3.897 | 1.00 | 36.83 | | O |
| ATOM | 500 | CG2 | THR | 61 | 46.345 | 5.178 | −2.424 | 1.00 | 36.83 | | C |
| ATOM | 501 | C | THR | 61 | 48.613 | 6.821 | −3.013 | 1.00 | 36.83 | | C |
| ATOM | 502 | O | THR | 61 | 49.282 | 6.785 | −1.989 | 1.00 | 36.83 | | O |
| ATOM | 503 | N | PHE | 62 | 48.094 | 7.943 | −3.475 | 1.00 | 36.83 | | N |
| ATOM | 504 | CA | PHE | 62 | 48.291 | 9.186 | −2.750 | 1.00 | 36.83 | | C |
| ATOM | 505 | CB | PHE | 62 | 49.152 | 10.147 | −3.581 | 1.00 | 36.83 | | C |
| ATOM | 506 | CG | PHE | 62 | 48.593 | 10.435 | −4.946 | 1.00 | 36.83 | | C |
| ATOM | 507 | CD1 | PHE | 62 | 48.825 | 9.569 | −6.011 | 1.00 | 36.83 | | C |
| ATOM | 508 | CD2 | PHE | 62 | 47.827 | 11.580 | −5.171 | 1.00 | 36.83 | | C |
| ATOM | 509 | CE1 | PHE | 62 | 48.300 | 9.843 | −7.290 | 1.00 | 36.83 | | C |
| ATOM | 510 | CE2 | PHE | 62 | 47.302 | 11.860 | −6.432 | 1.00 | 36.83 | | C |
| ATOM | 511 | CZ | PHE | 62 | 47.539 | 10.993 | −7.495 | 1.00 | 36.83 | | C |
| ATOM | 512 | C | PHE | 62 | 46.980 | 9.858 | −2.383 | 1.00 | 36.83 | | C |
| ATOM | 513 | O | PHE | 62 | 45.923 | 9.506 | −2.890 | 1.00 | 36.83 | | O |
| ATOM | 514 | N | LYS | 63 | 47.066 | 10.826 | −1.482 | 1.00 | 36.83 | | N |
| ATOM | 515 | CA | LYS | 63 | 45.914 | 11.586 | −1.037 | 1.00 | 36.83 | | C |
| ATOM | 516 | CB | LYS | 63 | 46.003 | 11.845 | 0.474 | 1.00 | 36.83 | | C |
| ATOM | 517 | CG | LYS | 63 | 45.425 | 10.730 | 1.323 | 1.00 | 36.83 | | C |
| ATOM | 518 | CD | LYS | 63 | 45.177 | 11.190 | 2.748 | 1.00 | 36.83 | | C |
| ATOM | 519 | CE | LYS | 63 | 44.258 | 10.216 | 3.478 | 1.00 | 36.83 | | C |
| ATOM | 520 | NZ | LYS | 63 | 42.925 | 10.111 | 2.806 | 1.00 | 36.83 | | N |
| ATOM | 521 | C | LYS | 63 | 45.909 | 12.924 | −1.771 | 1.00 | 36.83 | | C |
| ATOM | 522 | O | LYS | 63 | 46.927 | 13.613 | −1.796 | 1.00 | 36.83 | | O |
| ATOM | 523 | N | THR | 64 | 44.780 | 13.301 | −2.365 | 1.00 | 36.83 | | N |
| ATOM | 524 | CA | THR | 64 | 44.718 | 14.594 | −3.056 | 1.00 | 36.83 | | C |
| ATOM | 525 | CB | THR | 64 | 43.515 | 14.684 | −3.982 | 1.00 | 36.83 | | C |
| ATOM | 526 | OG1 | THR | 64 | 42.320 | 14.781 | −3.195 | 1.00 | 36.83 | | O |
| ATOM | 527 | CG2 | THR | 64 | 43.446 | 13.456 | −4.867 | 1.00 | 36.83 | | C |
| ATOM | 528 | C | THR | 64 | 44.587 | 15.701 | −2.010 | 1.00 | 36.83 | | C |
| ATOM | 529 | O | THR | 64 | 44.545 | 15.416 | −0.805 | 1.00 | 36.83 | | O |
| ATOM | 530 | N | VAL | 65 | 44.536 | 16.960 | −2.444 | 1.00 | 36.83 | | N |
| ATOM | 531 | CA | VAL | 65 | 44.393 | 18.045 | −1.471 | 1.00 | 36.83 | | C |
| ATOM | 532 | CB | VAL | 65 | 44.744 | 19.435 | −2.064 | 1.00 | 36.83 | | C |
| ATOM | 533 | CG1 | VAL | 65 | 46.265 | 19.608 | −2.129 | 1.00 | 36.83 | | C |
| ATOM | 534 | CG2 | VAL | 65 | 44.124 | 19.587 | −3.436 | 1.00 | 36.83 | | C |
| ATOM | 535 | C | VAL | 65 | 42.956 | 18.056 | −0.991 | 1.00 | 36.83 | | C |
| ATOM | 536 | O | VAL | 65 | 42.695 | 18.097 | 0.214 | 1.00 | 36.83 | | O |
| ATOM | 537 | N | ASP | 66 | 42.026 | 18.000 | −1.941 | 1.00 | 36.83 | | N |
| ATOM | 538 | CA | ASP | 66 | 40.609 | 17.980 | −1.611 | 1.00 | 36.83 | | C |
| ATOM | 539 | CB | ASP | 66 | 39.763 | 17.779 | −2.880 | 1.00 | 36.83 | | C |
| ATOM | 540 | CG | ASP | 66 | 40.464 | 16.929 | −3.932 | 1.00 | 36.83 | | C |
| ATOM | 541 | OD1 | ASP | 66 | 41.622 | 17.262 | −4.289 | 1.00 | 36.83 | | O |
| ATOM | 542 | OD2 | ASP | 66 | 39.855 | 15.939 | −4.415 | 1.00 | 36.83 | | O |
| ATOM | 543 | C | ASP | 66 | 40.343 | 16.871 | −0.588 | 1.00 | 36.83 | | C |
| ATOM | 544 | O | ASP | 66 | 39.457 | 17.006 | 0.271 | 1.00 | 36.83 | | O |
| ATOM | 545 | N | GLY | 67 | 41.116 | 15.785 | −0.672 | 1.00 | 36.83 | | N |
| ATOM | 546 | CA | GLY | 67 | 40.962 | 14.695 | 0.277 | 1.00 | 36.83 | | C |
| ATOM | 547 | C | GLY | 67 | 40.545 | 13.337 | −0.261 | 1.00 | 36.83 | | C |
| ATOM | 548 | O | GLY | 67 | 39.916 | 12.557 | 0.466 | 1.00 | 36.83 | | O |
| ATOM | 549 | N | GLN | 68 | 40.874 | 13.042 | −1.518 | 1.00 | 36.83 | | N |
| ATOM | 550 | CA | GLN | 68 | 40.522 | 11.746 | −2.107 | 1.00 | 36.83 | | C |
| ATOM | 551 | CB | GLN | 68 | 40.130 | 11.895 | −3.572 | 1.00 | 36.83 | | C |
| ATOM | 552 | CG | GLN | 68 | 38.644 | 11.811 | −3.859 | 1.00 | 36.83 | | C |
| ATOM | 553 | CD | GLN | 68 | 37.915 | 13.116 | −3.592 | 1.00 | 36.83 | | C |
| ATOM | 554 | OE1 | GLN | 68 | 37.887 | 13.613 | −2.456 | 1.00 | 36.83 | | O |
| ATOM | 555 | NE2 | GLN | 68 | 37.319 | 13.682 | −4.644 | 1.00 | 36.83 | | N |
| ATOM | 556 | C | GLN | 68 | 41.705 | 10.777 | −2.021 | 1.00 | 36.83 | | C |
| ATOM | 557 | O | GLN | 68 | 42.670 | 11.007 | −1.280 | 1.00 | 36.83 | | O |
| ATOM | 558 | N | ASP | 69 | 41.613 | 9.696 | −2.789 | 1.00 | 36.83 | | N |
| ATOM | 559 | CA | ASP | 69 | 42.653 | 8.674 | −2.842 | 1.00 | 36.83 | | C |
| ATOM | 560 | CB | ASP | 69 | 42.285 | 7.460 | −1.991 | 1.00 | 36.83 | | C |
| ATOM | 561 | CG | ASP | 69 | 43.019 | 7.431 | −0.671 | 1.00 | 36.83 | | C |
| ATOM | 562 | OD1 | ASP | 69 | 43.006 | 6.363 | 0.001 | 1.00 | 36.83 | | O |
| ATOM | 563 | OD2 | ASP | 69 | 43.599 | 8.464 | −0.295 | 1.00 | 36.83 | | O |
| ATOM | 564 | C | ASP | 69 | 42.835 | 8.227 | −4.272 | 1.00 | 36.83 | | C |
| ATOM | 565 | O | ASP | 69 | 42.029 | 7.468 | −4.812 | 1.00 | 36.83 | | O |
| ATOM | 566 | N | ARG | 70 | 43.894 | 8.704 | −4.897 | 1.00 | 36.83 | | N |
| ATOM | 567 | CA | ARG | 70 | 44.155 | 8.323 | −6.264 | 1.00 | 36.83 | | C |
| ATOM | 568 | CB | ARG | 70 | 44.460 | 9.545 | −7.129 | 1.00 | 36.83 | | C |
| ATOM | 569 | CG | ARG | 70 | 43.283 | 10.478 | −7.350 | 1.00 | 36.83 | | C |
| ATOM | 570 | CD | ARG | 70 | 43.630 | 11.473 | −8.439 | 1.00 | 36.83 | | C |
| ATOM | 571 | NE | ARG | 70 | 42.673 | 12.574 | −8.533 | 1.00 | 36.83 | | N |
| ATOM | 572 | CZ | ARG | 70 | 42.803 | 13.585 | −9.384 | 1.00 | 36.83 | | C |
| ATOM | 573 | NH1 | ARG | 70 | 43.841 | 13.620 | −10.204 | 1.00 | 36.83 | | N |
| ATOM | 574 | NH2 | ARG | 70 | 41.910 | 14.561 | −9.404 | 1.00 | 36.83 | | N |
| ATOM | 575 | C | ARG | 70 | 45.339 | 7.391 | −6.271 | 1.00 | 36.83 | | C |
| ATOM | 576 | O | ARG | 70 | 46.169 | 7.416 | −5.362 | 1.00 | 36.83 | | O |
| ATOM | 577 | N | GLN | 71 | 45.414 | 6.590 | −7.321 | 1.00 | 36.83 | | N |
| ATOM | 578 | CA | GLN | 71 | 46.466 | 5.624 | −7.478 | 1.00 | 36.83 | | C |
| ATOM | 579 | CB | GLN | 71 | 45.828 | 4.232 | −7.476 | 1.00 | 36.83 | | C |
| ATOM | 580 | CG | GLN | 71 | 46.776 | 3.054 | −7.267 | 1.00 | 36.83 | | C |
| ATOM | 581 | CD | GLN | 71 | 46.016 | 1.758 | −6.982 | 1.00 | 36.83 | | C |
| ATOM | 582 | OE1 | GLN | 71 | 45.087 | 1.390 | −7.713 | 1.00 | 36.83 | | O |
| ATOM | 583 | NE2 | GLN | 71 | 46.411 | 1.058 | −5.915 | 1.00 | 36.83 | | N |
| ATOM | 584 | C | GLN | 71 | 47.131 | 5.916 | −8.817 | 1.00 | 36.83 | | C |
| ATOM | 585 | O | GLN | 71 | 46.481 | 6.420 | −9.733 | 1.00 | 36.83 | | O |
| ATOM | 586 | N | VAL | 72 | 48.424 | 5.615 | −8.925 | 1.00 | 36.83 | | N |
| ATOM | 587 | CA | VAL | 72 | 49.164 | 5.818 | −10.170 | 1.00 | 36.83 | | C |
| ATOM | 588 | CB | VAL | 72 | 49.690 | 7.265 | −10.284 | 1.00 | 36.83 | | C |
| ATOM | 589 | CG1 | VAL | 72 | 50.599 | 7.581 | −9.111 | 1.00 | 36.83 | | C |
| ATOM | 590 | CG2 | VAL | 72 | 50.443 | 7.440 | −11.591 | 1.00 | 36.83 | | C |
| ATOM | 591 | C | VAL | 72 | 50.345 | 4.851 | −10.256 | 1.00 | 36.83 | | C |
| ATOM | 592 | O | VAL | 72 | 50.938 | 4.492 | −9.239 | 1.00 | 36.83 | | O |
| ATOM | 593 | N | LYS | 73 | 50.674 | 4.422 | −11.474 | 1.00 | 36.83 | | N |
| ATOM | 594 | CA | LYS | 73 | 51.780 | 3.492 | −11.693 | 1.00 | 36.83 | | C |
| ATOM | 595 | CB | LYS | 73 | 51.790 | 3.020 | −13.158 | 1.00 | 36.83 | | C |
| ATOM | 596 | CG | LYS | 73 | 50.681 | 2.019 | −13.528 | 1.00 | 36.83 | | C |
| ATOM | 597 | CD | LYS | 73 | 51.029 | 0.592 | −13.049 | 1.00 | 36.83 | | C |
| ATOM | 598 | CE | LYS | 73 | 49.845 | −0.360 | −13.187 | 1.00 | 36.83 | | C |
| ATOM | 599 | NZ | LYS | 73 | 49.171 | −0.238 | −14.523 | 1.00 | 36.83 | | N |
| ATOM | 600 | C | LYS | 73 | 53.117 | 4.154 | −11.349 | 1.00 | 36.83 | | C |
| ATOM | 601 | O | LYS | 73 | 53.296 | 5.357 | −11.550 | 1.00 | 36.83 | | O |
| ATOM | 602 | N | LYS | 74 | 54.058 | 3.374 | −10.831 | 1.00 | 36.83 | | N |
| ATOM | 603 | CA | LYS | 74 | 55.360 | 3.922 | −10.475 | 1.00 | 36.83 | | C |
| ATOM | 604 | CB | LYS | 74 | 56.201 | 2.867 | −9.754 | 1.00 | 36.83 | | C |
| ATOM | 605 | CG | LYS | 74 | 55.772 | 2.660 | −8.322 | 1.00 | 36.83 | | C |
| ATOM | 606 | CD | LYS | 74 | 56.617 | 1.618 | −7.600 | 1.00 | 36.83 | | C |
| ATOM | 607 | CE | LYS | 74 | 56.226 | 1.567 | −6.122 | 1.00 | 36.83 | | C |
| ATOM | 608 | NZ | LYS | 74 | 56.991 | 0.588 | −5.311 | 1.00 | 36.83 | | N |
| ATOM | 609 | C | LYS | 74 | 56.114 | 4.465 | −11.685 | 1.00 | 36.83 | | C |
| ATOM | 610 | O | LYS | 74 | 56.831 | 5.465 | −11.590 | 1.00 | 36.83 | | O |
| ATOM | 611 | N | ASP | 75 | 55.941 | 3.795 | −12.819 | 1.00 | 36.83 | | N |
| ATOM | 612 | CA | ASP | 75 | 56.582 | 4.188 | −14.059 | 1.00 | 36.83 | | C |
| ATOM | 613 | CB | ASP | 75 | 56.432 | 3.069 | −15.091 | 1.00 | 36.83 | | C |
| ATOM | 614 | CG | ASP | 75 | 57.442 | 1.940 | −14.884 | 1.00 | 36.83 | | C |
| ATOM | 615 | OD1 | ASP | 75 | 57.371 | 0.925 | −15.631 | 1.00 | 36.83 | | O |
| ATOM | 616 | OD2 | ASP | 75 | 58.308 | 2.075 | −13.983 | 1.00 | 36.83 | | O |
| ATOM | 617 | C | ASP | 75 | 56.007 | 5.489 | −14.620 | 1.00 | 36.83 | | C |
| ATOM | 618 | O | ASP | 75 | 56.614 | 6.108 | −15.495 | 1.00 | 36.83 | | O |
| ATOM | 619 | N | ASP | 76 | 54.844 | 5.903 | −14.123 | 1.00 | 36.83 | | N |
| ATOM | 620 | CA | ASP | 76 | 54.214 | 7.133 | −14.594 | 1.00 | 36.83 | | C |
| ATOM | 621 | CB | ASP | 76 | 52.828 | 6.842 | −15.174 | 1.00 | 36.83 | | C |
| ATOM | 622 | CG | ASP | 76 | 52.889 | 6.007 | −16.443 | 1.00 | 36.83 | | C |
| ATOM | 623 | OD1 | ASP | 76 | 53.603 | 6.398 | −17.400 | 1.00 | 36.83 | | O |
| ATOM | 624 | OD2 | ASP | 76 | 52.216 | 4.958 | −16.485 | 1.00 | 36.83 | | O |
| ATOM | 625 | C | ASP | 76 | 54.073 | 8.191 | −13.509 | 1.00 | 36.83 | | C |
| ATOM | 626 | O | ASP | 76 | 53.414 | 9.208 | −13.723 | 1.00 | 36.83 | | O |
| ATOM | 627 | N | ALA | 77 | 54.686 | 7.966 | −12.353 | 1.00 | 36.83 | | N |
| ATOM | 628 | CA | ALA | 77 | 54.571 | 8.926 | −11.266 | 1.00 | 36.83 | | C |
| ATOM | 629 | CB | ALA | 77 | 54.695 | 8.210 | −9.913 | 1.00 | 36.83 | | C |
| ATOM | 630 | C | ALA | 77 | 55.565 | 10.076 | −11.330 | 1.00 | 36.83 | | C |
| ATOM | 631 | O | ALA | 77 | 56.680 | 9.931 | −11.814 | 1.00 | 36.83 | | O |
| ATOM | 632 | N | ASN | 78 | 55.130 | 11.229 | −10.847 | 1.00 | 36.83 | | N |
| ATOM | 633 | CA | ASN | 78 | 55.983 | 12.408 | −10.783 | 1.00 | 36.83 | | C |
| ATOM | 634 | CB | ASN | 78 | 55.288 | 13.609 | −11.408 | 1.00 | 36.83 | | C |
| ATOM | 635 | CG | ASN | 78 | 55.225 | 13.519 | −12.897 | 1.00 | 36.83 | | C |
| ATOM | 636 | OD1 | ASN | 78 | 56.244 | 13.375 | −13.560 | 1.00 | 36.83 | | O |
| ATOM | 637 | ND2 | ASN | 78 | 54.028 | 13.612 | −13.439 | 1.00 | 36.83 | | N |
| ATOM | 638 | C | ASN | 78 | 56.255 | 12.694 | −9.315 | 1.00 | 36.83 | | C |
| ATOM | 639 | O | ASN | 78 | 55.655 | 13.595 | −8.732 | 1.00 | 36.83 | | O |
| ATOM | 640 | N | GLN | 79 | 57.142 | 11.912 | −8.713 | 1.00 | 36.83 | | N |
| ATOM | 641 | CA | GLN | 79 | 57.465 | 12.104 | −7.308 | 1.00 | 36.83 | | C |
| ATOM | 642 | CB | GLN | 79 | 58.452 | 11.029 | −6.829 | 1.00 | 36.83 | | C |
| ATOM | 643 | CG | GLN | 79 | 57.817 | 9.665 | −6.597 | 1.00 | 36.83 | | C |
| ATOM | 644 | CD | GLN | 79 | 58.737 | 8.695 | −5.883 | 1.00 | 36.83 | | C |
| ATOM | 645 | OE1 | GLN | 79 | 59.590 | 8.053 | −6.495 | 1.00 | 36.83 | | O |
| ATOM | 646 | NE2 | GLN | 79 | 58.569 | 8.589 | −4.579 | 1.00 | 36.83 | | N |
| ATOM | 647 | C | GLN | 79 | 58.062 | 13.484 | −7.075 | 1.00 | 36.83 | | C |
| ATOM | 648 | O | GLN | 79 | 58.739 | 14.039 | −7.946 | 1.00 | 36.83 | | O |
| ATOM | 649 | N | ARG | 80 | 57.785 | 14.043 | −5.905 | 1.00 | 36.83 | | N |
| ATOM | 650 | CA | ARG | 80 | 58.329 | 15.340 | −5.561 | 1.00 | 36.83 | | C |
| ATOM | 651 | CB | ARG | 80 | 57.384 | 16.097 | −4.638 | 1.00 | 36.83 | | C |
| ATOM | 652 | CG | ARG | 80 | 57.962 | 17.411 | −4.129 | 1.00 | 36.83 | | C |
| ATOM | 653 | CD | ARG | 80 | 56.932 | 18.215 | −3.362 | 1.00 | 36.83 | | C |
| ATOM | 654 | NE | ARG | 80 | 57.533 | 19.404 | −2.763 | 1.00 | 36.83 | | N |
| ATOM | 655 | CZ | ARG | 80 | 56.853 | 20.343 | −2.117 | 1.00 | 36.83 | | C |
| ATOM | 656 | NH1 | ARG | 80 | 55.537 | 20.236 | −1.978 | 1.00 | 36.83 | | N |
| ATOM | 657 | NH2 | ARG | 80 | 57.492 | 21.395 | −1.621 | 1.00 | 36.83 | | N |
| ATOM | 658 | C | ARG | 80 | 59.651 | 15.126 | −4.857 | 1.00 | 36.83 | | C |
| ATOM | 659 | O | ARG | 80 | 59.826 | 14.174 | −4.103 | 1.00 | 36.83 | | O |
| ATOM | 660 | N | ASN | 81 | 60.595 | 16.010 | −5.110 | 1.00 | 36.83 | | N |
| ATOM | 661 | CA | ASN | 81 | 61.889 | 15.910 | −4.466 | 1.00 | 36.83 | | C |
| ATOM | 662 | CB | ASN | 81 | 62.893 | 16.834 | −5.166 | 1.00 | 36.83 | | C |
| ATOM | 663 | CG | ASN | 81 | 63.421 | 16.238 | −6.457 | 1.00 | 36.83 | | C |
| ATOM | 664 | OD1 | ASN | 81 | 64.034 | 15.168 | −6.448 | 1.00 | 36.83 | | O |
| ATOM | 665 | ND2 | ASN | 81 | 63.182 | 16.918 | −7.570 | 1.00 | 36.83 | | N |
| ATOM | 666 | C | ASN | 81 | 61.769 | 16.293 | −3.001 | 1.00 | 36.83 | | C |
| ATOM | 667 | O | ASN | 81 | 60.845 | 16.998 | −2.617 | 1.00 | 36.83 | | O |
| ATOM | 668 | N | PRO | 82 | 62.670 | 15.777 | −2.153 | 1.00 | 36.83 | | N |
| ATOM | 669 | CD | PRO | 82 | 63.571 | 14.636 | −2.397 | 1.00 | 36.83 | | C |
| ATOM | 670 | CA | PRO | 82 | 62.629 | 16.123 | −0.728 | 1.00 | 36.83 | | C |
| ATOM | 671 | CB | PRO | 82 | 63.868 | 15.429 | −0.178 | 1.00 | 36.83 | | C |
| ATOM | 672 | CG | PRO | 82 | 63.884 | 14.155 | −0.984 | 1.00 | 36.83 | | C |
| ATOM | 673 | C | PRO | 82 | 62.741 | 17.639 | −0.685 | 1.00 | 36.83 | | C |
| ATOM | 674 | O | PRO | 82 | 63.448 | 18.217 | −1.496 | 1.00 | 36.83 | | O |
| ATOM | 675 | N | ILE | 83 | 62.068 | 18.298 | 0.245 | 1.00 | 36.83 | | N |
| ATOM | 676 | CA | ILE | 83 | 62.124 | 19.743 | 0.242 | 1.00 | 36.83 | | C |
| ATOM | 677 | CB | ILE | 83 | 61.062 | 20.362 | 1.183 | 1.00 | 36.83 | | C |
| ATOM | 678 | CG2 | ILE | 83 | 59.687 | 19.800 | 0.833 | 1.00 | 36.83 | | C |
| ATOM | 679 | CG1 | ILE | 83 | 61.398 | 20.098 | 2.645 | 1.00 | 36.83 | | C |
| ATOM | 680 | CD1 | ILE | 83 | 61.284 | 18.651 | 3.045 | 1.00 | 36.83 | | C |
| ATOM | 681 | C | ILE | 83 | 63.491 | 20.348 | 0.509 | 1.00 | 36.83 | | C |
| ATOM | 682 | O | ILE | 83 | 63.663 | 21.560 | 0.376 | 1.00 | 36.83 | | O |
| ATOM | 683 | N | LYS | 84 | 64.470 | 19.524 | 0.860 | 1.00 | 36.83 | | N |
| ATOM | 684 | CA | LYS | 84 | 65.800 | 20.062 | 1.095 | 1.00 | 36.83 | | C |
| ATOM | 685 | CB | LYS | 84 | 66.718 | 19.042 | 1.793 | 1.00 | 36.83 | | C |
| ATOM | 686 | CG | LYS | 84 | 67.093 | 17.813 | 0.972 | 1.00 | 36.83 | | C |
| ATOM | 687 | CD | LYS | 84 | 68.260 | 17.094 | 1.648 | 1.00 | 36.83 | | C |
| ATOM | 688 | CE | LYS | 84 | 68.358 | 15.624 | 1.269 | 1.00 | 36.83 | | C |
| ATOM | 689 | NZ | LYS | 84 | 68.567 | 1.5.414 | −0.183 | 1.00 | 36.83 | | N |
| ATOM | 690 | C | LYS | 84 | 66.385 | 20.471 | −0.256 | 1.00 | 36.83 | | C |
| ATOM | 691 | O | LYS | 84 | 67.387 | 21.157 | −0.317 | 1.00 | 36.83 | | O |
| ATOM | 692 | N | PHE | 85 | 65.736 | 20.051 | −1.338 | 1.00 | 36.83 | | N |
| ATOM | 693 | CA | PHE | 85 | 66.176 | 20.389 | −2.691 | 1.00 | 36.83 | | C |
| ATOM | 694 | CB | PHE | 85 | 65.914 | 19.232 | −3.649 | 1.00 | 36.83 | | C |
| ATOM | 695 | CG | PHE | 85 | 66.951 | 18.156 | −3.607 | 1.00 | 36.83 | | C |
| ATOM | 696 | CD1 | PHE | 85 | 68.206 | 18.358 | −4.170 | 1.00 | 36.83 | | C |
| ATOM | 697 | CD2 | PHE | 85 | 66.669 | 16.927 | −3.030 | 1.00 | 36.83 | | C |
| ATOM | 698 | CE1 | PHE | 85 | 69.174 | 17.344 | −4.162 | 1.00 | 36.83 | | C |
| ATOM | 699 | CE2 | PHE | 85 | 67.626 | 15.909 | −3.016 | 1.00 | 36.83 | | C |
| ATOM | 700 | CZ | PHE | 85 | 68.878 | 16.120 | −3.583 | 1.00 | 36.83 | | C |
| ATOM | 701 | C | PHE | 85 | 65.448 | 21.624 | −3.220 | 1.00 | 36.83 | | C |
| ATOM | 702 | O | PHE | 85 | 65.779 | 22.133 | −4.287 | 1.00 | 36.83 | | O |
| ATOM | 703 | N | ASP | 86 | 64.455 | 22.107 | −2.491 | 1.00 | 36.83 | | N |
| ATOM | 704 | CA | ASP | 86 | 63.730 | 23.278 | −2.957 | 1.00 | 36.83 | | C |
| ATOM | 705 | CB | ASP | 86 | 62.426 | 23.460 | −2.171 | 1.00 | 36.83 | | C |
| ATOM | 706 | CG | ASP | 86 | 61.362 | 22.434 | −2.562 | 1.00 | 36.83 | | C |
| ATOM | 707 | OD1 | ASP | 86 | 60.229 | 22.511 | −2.047 | 1.00 | 36.83 | | O |
| ATOM | 708 | OD2 | ASP | 86 | 61.658 | 21.544 | −3.385 | 1.00 | 36.83 | | O |
| ATOM | 709 | C | ASP | 86 | 64.578 | 24.544 | −2.894 | 1.00 | 36.83 | | C |
| ATOM | 710 | O | ASP | 86 | 64.846 | 25.082 | −1.820 | 1.00 | 36.83 | | O |
| ATOM | 711 | N | GLY | 87 | 65.002 | 25.003 | −4.068 | 1.00 | 36.83 | | N |
| ATOM | 712 | CA | GLY | 87 | 65.796 | 26.210 | −4.149 | 1.00 | 36.83 | | C |
| ATOM | 713 | C | GLY | 87 | 67.174 | 25.924 | −4.682 | 1.00 | 36.83 | | C |
| ATOM | 714 | O | GLY | 87 | 67.900 | 26.850 | −5.028 | 1.00 | 36.83 | | O |
| ATOM | 715 | N | VAL | 88 | 67.526 | 24.639 | −4.748 | 1.00 | 36.83 | | N |
| ATOM | 716 | CA | VAL | 88 | 68.835 | 24.210 | −5.221 | 1.00 | 36.83 | | C |
| ATOM | 717 | CB | VAL | 88 | 68.809 | 22.698 | −5.601 | 1.00 | 36.83 | | C |
| ATOM | 718 | CG1 | VAL | 88 | 68.352 | 22.508 | −7.037 | 1.00 | 36.83 | | C |
| ATOM | 719 | CG2 | VAL | 88 | 70.166 | 22.080 | −5.360 | 1.00 | 36.83 | | C |
| ATOM | 720 | C | VAL | 88 | 69.296 | 25.075 | −6.401 | 1.00 | 36.83 | | C |
| ATOM | 721 | O | VAL | 88 | 68.489 | 25.497 | −7.234 | 1.00 | 36.83 | | O |
| ATOM | 722 | N | GLU | 89 | 70.592 | 25.347 | −6.468 | 1.00 | 36.83 | | N |
| ATOM | 723 | CA | GLU | 89 | 71.136 | 26.196 | −7.524 | 1.00 | 36.83 | | C |
| ATOM | 724 | CB | GLU | 89 | 72.428 | 26.844 | −7.043 | 1.00 | 36.83 | | C |
| ATOM | 725 | CG | GLU | 89 | 72.323 | 27.456 | −5.668 | 1.00 | 36.83 | | C |
| ATOM | 726 | CD | GLU | 89 | 73.542 | 28.267 | −5.333 | 1.00 | 36.83 | | C |
| ATOM | 727 | OE1 | GLU | 89 | 74.666 | 27.827 | −5.684 | 1.00 | 36.83 | | O |
| ATOM | 728 | OE2 | GLU | 89 | 73.372 | 29.341 | −4.724 | 1.00 | 36.83 | | O |
| ATOM | 729 | C | GLU | 89 | 71.396 | 25.505 | −8.851 | 1.00 | 36.83 | | C |
| ATOM | 730 | O | GLU | 89 | 71.405 | 26.142 | −9.890 | 1.00 | 36.83 | | O |
| ATOM | 731 | N | ASP | 90 | 71.609 | 24.198 | −8.802 | 1.00 | 36.83 | | N |
| ATOM | 732 | CA | ASP | 90 | 71.887 | 23.414 | −9.989 | 1.00 | 36.83 | | C |
| ATOM | 733 | CB | ASP | 90 | 73.310 | 22.864 | −9.900 | 1.00 | 36.83 | | C |
| ATOM | 734 | CG | ASP | 90 | 73.838 | 22.381 | −11.228 | 1.00 | 36.83 | | C |
| ATOM | 735 | OD1 | ASP | 90 | 73.079 | 21.707 | −11.951 | 1.00 | 36.83 | | O |
| ATOM | 736 | OD2 | ASP | 90 | 75.020 | 22.669 | −11.542 | 1.00 | 36.83 | | O |
| ATOM | 737 | C | ASP | 90 | 70.880 | 22.271 | −9.986 | 1.00 | 36.83 | | C |
| ATOM | 738 | O | ASP | 90 | 70.969 | 21.366 | −9.158 | 1.00 | 36.83 | | O |
| ATOM | 739 | N | MET | 91 | 69.925 | 22.313 | −10.909 | 1.00 | 36.83 | | N |
| ATOM | 740 | CA | MET | 91 | 68.891 | 21.290 | −10.977 | 1.00 | 36.83 | | C |
| ATOM | 741 | CB | MET | 91 | 67.754 | 21.757 | −11.887 | 1.00 | 36.83 | | C |
| ATOM | 742 | CG | MET | 91 | 67.139 | 23.064 | −11.404 | 1.00 | 36.83 | | C |
| ATOM | 743 | SD | MET | 91 | 65.634 | 23.513 | −12.244 | 1.00 | 36.83 | | S |
| ATOM | 744 | CE | MET | 91 | 66.263 | 23.836 | −13.851 | 1.00 | 36.83 | | C |
| ATOM | 745 | C | MET | 91 | 69.404 | 19.916 | −11.398 | 1.00 | 36.83 | | C |
| ATOM | 746 | O | MET | 91 | 68.636 | 18.962 | −11.475 | 1.00 | 36.83 | | O |
| ATOM | 747 | N | SER | 92 | 70.705 | 19.819 | −11.658 | 1.00 | 36.83 | | N |
| ATOM | 748 | CA | SER | 92 | 71.321 | 18.543 | −12.020 | 1.00 | 36.83 | | C |
| ATOM | 749 | CB | SER | 92 | 72.785 | 18.752 | −12.441 | 1.00 | 36.83 | | C |
| ATOM | 750 | OG | SER | 92 | 72.882 | 19.624 | −13.550 | 1.00 | 36.83 | | O |
| ATOM | 751 | C | SER | 92 | 71.304 | 17.644 | −10.784 | 1.00 | 36.83 | | C |
| ATOM | 752 | O | SER | 92 | 71.316 | 16.420 | −10.888 | 1.00 | 36.83 | | O |
| ATOM | 753 | N | GLU | 93 | 71.275 | 18.283 | −9.620 | 1.00 | 36.83 | | N |
| ATOM | 754 | CA | GLU | 93 | 71.292 | 17.622 | −8.326 | 1.00 | 36.83 | | C |
| ATOM | 755 | CB | GLU | 93 | 71.771 | 18.616 | −7.272 | 1.00 | 36.83 | | C |
| ATOM | 756 | CG | GLU | 93 | 73.171 | 19.159 | −7.478 | 1.00 | 36.83 | | C |
| ATOM | 757 | CD | GLU | 93 | 73.498 | 20.276 | −6.494 | 1.00 | 36.83 | | C |
| ATOM | 758 | OE1 | GLU | 93 | 73.371 | 20.075 | −5.266 | 1.00 | 36.83 | | O |
| ATOM | 759 | OE2 | GLU | 93 | 73.877 | 21.372 | −6.956 | 1.00 | 36.83 | | O |
| ATOM | 760 | C | GLU | 93 | 69.992 | 16.985 | −7.824 | 1.00 | 36.83 | | C |
| ATOM | 761 | O | GLU | 93 | 70.015 | 16.270 | −6.816 | 1.00 | 36.83 | | O |
| ATOM | 762 | N | LEU | 94 | 68.873 | 17.251 | −8.500 | 1.00 | 36.83 | | N |
| ATOM | 763 | CA | LEU | 94 | 67.576 | 16.723 | −8.088 | 1.00 | 36.83 | | C |
| ATOM | 764 | CB | LEU | 94 | 66.465 | 17.288 | −8.976 | 1.00 | 36.83 | | C |
| ATOM | 765 | CG | LEU | 94 | 66.157 | 18.787 | −8.927 | 1.00 | 36.83 | | C |
| ATOM | 766 | CD1 | LEU | 94 | 65.115 | 19.101 | −9.967 | 1.00 | 36.83 | | C |
| ATOM | 767 | CD2 | LEU | 94 | 65.666 | 19.193 | −7.544 | 1.00 | 36.83 | | C |
| ATOM | 768 | C | LEU | 94 | 67.501 | 15.204 | −8.122 | 1.00 | 36.83 | | C |
| ATOM | 769 | O | LEU | 94 | 67.918 | 14.591 | −9.093 | 1.00 | 36.83 | | O |
| ATOM | 770 | N | SER | 95 | 66.955 | 14.602 | −7.068 | 1.00 | 36.83 | | N |
| ATOM | 771 | CA | SER | 95 | 66.822 | 13.150 | −7.015 | 1.00 | 36.83 | | C |
| ATOM | 772 | CB | SER | 95 | 66.207 | 12.697 | −5.690 | 1.00 | 36.83 | | C |
| ATOM | 773 | OG | SER | 95 | 66.693 | 13.478 | −4.622 | 1.00 | 36.83 | | O |
| ATOM | 774 | C | SER | 95 | 65.896 | 12.754 | −8.149 | 1.00 | 36.83 | | C |
| ATOM | 775 | O | SER | 95 | 66.184 | 11.819 | −8.883 | 1.00 | 36.83 | | O |
| ATOM | 776 | N | TYR | 96 | 64.785 | 13.479 | −8.280 | 1.00 | 36.83 | | N |
| ATOM | 777 | CA | TYR | 96 | 63.795 | 13.243 | −9.328 | 1.00 | 36.83 | | C |
| ATOM | 778 | CB | TYR | 96 | 62.394 | 13.139 | −8.731 | 1.00 | 36.83 | | C |
| ATOM | 779 | CG | TYR | 96 | 62.328 | 12.215 | −7.552 | 1.00 | 36.83 | | C |
| ATOM | 780 | CD1 | TYR | 96 | 62.848 | 10.917 | −7.618 | 1.00 | 36.83 | | C |
| ATOM | 781 | CE1 | TYR | 96 | 62.806 | 10.069 | −6.506 | 1.00 | 36.83 | | C |
| ATOM | 782 | CD2 | TYR | 96 | 61.765 | 12.638 | −6.354 | 1.00 | 36.83 | | C |
| ATOM | 783 | CE2 | TYR | 96 | 61.714 | 11.808 | −5.251 | 1.00 | 36.83 | | C |
| ATOM | 784 | CZ | TYR | 96 | 62.235 | 10.531 | −5.328 | 1.00 | 36.83 | | C |
| ATOM | 785 | OH | TYR | 96 | 62.181 | 9.733 | −4.211 | 1.00 | 36.83 | | O |
| ATOM | 786 | C | TYR | 96 | 63.808 | 14.351 | −10.378 | 1.00 | 36.83 | | C |
| ATOM | 787 | O | TYR | 96 | 63.759 | 15.543 | −10.062 | 1.00 | 36.83 | | O |
| ATOM | 788 | N | LEU | 97 | 63.863 | 13.937 | −11.634 | 1.00 | 36.83 | | N |
| ATOM | 789 | CA | LEU | 97 | 63.893 | 14.857 | −12.742 | 1.00 | 36.83 | | C |
| ATOM | 790 | CB | LEU | 97 | 65.165 | 14.601 | −13.549 | 1.00 | 36.83 | | C |
| ATOM | 791 | CG | LEU | 97 | 65.882 | 15.766 | −14.241 | 1.00 | 36.83 | | C |
| ATOM | 792 | CD1 | LEU | 97 | 65.766 | 15.640 | −15.764 | 1.00 | 36.83 | | C |
| ATOM | 793 | CD2 | LEU | 97 | 65.330 | 17.101 | −13.733 | 1.00 | 36.83 | | C |
| ATOM | 794 | C | LEU | 97 | 62.649 | 14.722 | −13.623 | 1.00 | 36.83 | | C |
| ATOM | 795 | O | LEU | 97 | 62.622 | 13.919 | −14.563 | 1.00 | 36.83 | | O |
| ATOM | 796 | N | ASN | 98 | 61.611 | 15.490 | −13.301 | 1.00 | 36.83 | | N |
| ATOM | 797 | CA | ASN | 98 | 60.376 | 15.489 | −14.081 | 1.00 | 36.83 | | C |
| ATOM | 798 | CB | ASN | 98 | 59.296 | 14.579 | −13.451 | 1.00 | 36.83 | | C |
| ATOM | 799 | CG | ASN | 98 | 59.029 | 14.880 | −11.978 | 1.00 | 36.83 | | C |
| ATOM | 800 | OD1 | ASN | 98 | 58.576 | 15.977 | −11.608 | 1.00 | 36.83 | | O |
| ATOM | 801 | ND2 | ASN | 98 | 59.297 | 13.890 | −11.124 | 1.00 | 36.83 | | N |
| ATOM | 802 | C | ASN | 98 | 59.877 | 16.927 | −14.222 | 1.00 | 36.83 | | C |
| ATOM | 803 | O | ASN | 98 | 60.319 | 17.818 | −13.492 | 1.00 | 36.83 | | O |
| ATOM | 804 | N | GLU | 99 | 58.963 | 17.157 | −15.161 | 1.00 | 36.83 | | N |
| ATOM | 805 | CA | GLU | 99 | 58.460 | 18.507 | −15.410 | 1.00 | 36.83 | | C |
| ATOM | 806 | CB | GLU | 99 | 57.381 | 18.470 | −16.481 | 1.00 | 36.83 | | C |
| ATOM | 807 | CG | GLU | 99 | 57.946 | 18.022 | −17.818 | 1.00 | 36.83 | | C |
| ATOM | 808 | CD | GLU | 99 | 56.942 | 18.077 | −18.933 | 1.00 | 36.83 | | C |
| ATOM | 809 | OE1 | GLU | 99 | 57.281 | 17.611 | −20.037 | 1.00 | 36.83 | | O |
| ATOM | 810 | OE2 | GLU | 99 | 55.827 | 18.588 | −18.704 | 1.00 | 36.83 | | O |
| ATOM | 811 | C | GLU | 99 | 57.969 | 19.296 | −14.210 | 1.00 | 36.83 | | C |
| ATOM | 812 | O | GLU | 99 | 58.388 | 20.430 | −14.007 | 1.00 | 36.83 | | O |
| ATOM | 813 | N | PRO | 100 | 57.074 | 18.718 | −13.399 | 1.00 | 36.83 | | N |
| ATOM | 814 | CD | PRO | 100 | 56.317 | 17.458 | −13.527 | 1.00 | 36.83 | | C |
| ATOM | 815 | CA | PRO | 100 | 56.613 | 19.496 | −12.247 | 1.00 | 36.83 | | C |
| ATOM | 816 | CB | PRO | 100 | 55.417 | 18.688 | −11.738 | 1.00 | 36.83 | | C |
| ATOM | 817 | CG | PRO | 100 | 55.759 | 17.284 | −12.142 | 1.00 | 36.83 | | C |
| ATOM | 818 | C | PRO | 100 | 57.675 | 19.727 | −11.176 | 1.00 | 36.83 | | C |
| ATOM | 819 | O | PRO | 100 | 57.565 | 20.670 | −10.394 | 1.00 | 36.83 | | O |
| ATOM | 820 | N | ALA | 101 | 58.691 | 18.870 | −11.127 | 1.00 | 36.83 | | N |
| ATOM | 821 | CA | ALA | 101 | 59.751 | 19.037 | −10.140 | 1.00 | 36.83 | | C |
| ATOM | 822 | CB | ALA | 101 | 60.549 | 17.754 | −9.985 | 1.00 | 36.83 | | C |
| ATOM | 823 | C | ALA | 101 | 60.683 | 20.175 | −10.562 | 1.00 | 36.83 | | C |
| ATOM | 824 | O | ALA | 101 | 61.080 | 21.002 | −9.733 | 1.00 | 36.83 | | O |
| ATOM | 825 | N | VAL | 102 | 61.043 | 20.208 | −11.841 | 1.00 | 36.83 | | N |
| ATOM | 826 | CA | VAL | 102 | 61.922 | 21.253 | −12.337 | 1.00 | 36.83 | | C |
| ATOM | 827 | CB | VAL | 102 | 62.403 | 20.964 | −13.783 | 1.00 | 36.83 | | C |
| ATOM | 828 | CG1 | VAL | 102 | 62.946 | 22.225 | −14.429 | 1.00 | 36.83 | | C |
| ATOM | 829 | CG2 | VAL | 102 | 63.509 | 19.921 | −13.751 | 1.00 | 36.83 | | C |
| ATOM | 830 | C | VAL | 102 | 61.214 | 22.596 | −12.270 | 1.00 | 36.83 | | C |
| ATOM | 831 | O | VAL | 102 | 61.829 | 23.582 | −11.898 | 1.00 | 36.83 | | O |
| ATOM | 832 | N | PHE | 103 | 59.924 | 22.637 | −12.604 | 1.00 | 36.83 | | N |
| ATOM | 833 | CA | PHE | 103 | 59.180 | 23.896 | −12.535 | 1.00 | 36.83 | | C |
| ATOM | 834 | CB | PHE | 103 | 57.775 | 23.745 | −13.128 | 1.00 | 36.83 | | C |
| ATOM | 835 | CG | PHE | 103 | 56.887 | 24.953 | −12.917 | 1.00 | 36.83 | | C |
| ATOM | 836 | CD1 | PHE | 103 | 57.253 | 26.203 | −13.395 | 1.00 | 36.83 | | C |
| ATOM | 837 | CD2 | PHE | 103 | 55.683 | 24.837 | −12.239 | 1.00 | 36.83 | | C |
| ATOM | 838 | CE1 | PHE | 103 | 56.439 | 27.314 | −13.205 | 1.00 | 36.83 | | C |
| ATOM | 839 | CE2 | PHE | 103 | 54.858 | 25.946 | −12.041 | 1.00 | 36.83 | | C |
| ATOM | 840 | CZ | PHE | 103 | 55.244 | 27.187 | −12.531 | 1.00 | 36.83 | | C |
| ATOM | 841 | C | PHE | 103 | 59.079 | 24.382 | −11.082 | 1.00 | 36.83 | | C |
| ATOM | 842 | O | PHE | 103 | 59.292 | 25.561 | −10.812 | 1.00 | 36.83 | | O |
| ATOM | 843 | N | HIS | 104 | 58.775 | 23.476 | −10.150 | 1.00 | 36.83 | | N |
| ATOM | 844 | CA | HIS | 104 | 58.658 | 23.860 | −8.741 | 1.00 | 36.83 | | C |
| ATOM | 845 | CB | HIS | 104 | 58.381 | 22.645 | −7.851 | 1.00 | 36.83 | | C |
| ATOM | 846 | CG | HIS | 104 | 58.292 | 22.978 | −6.393 | 1.00 | 36.83 | | C |
| ATOM | 847 | CD2 | HIS | 104 | 59.101 | 22.658 | −5.355 | 1.00 | 36.83 | | C |
| ATOM | 848 | ND1 | HIS | 104 | 57.286 | 23.758 | −5.867 | 1.00 | 36.83 | | N |
| ATOM | 849 | CE1 | HIS | 104 | 57.476 | 23.905 | −4.570 | 1.00 | 36.83 | | C |
| ATOM | 850 | NE2 | HIS | 104 | 58.572 | 23.248 | −4.234 | 1.00 | 36.83 | | N |
| ATOM | 851 | C | HIS | 104 | 59.898 | 24.581 | −8.206 | 1.00 | 36.83 | | C |
| ATOM | 852 | O | HIS | 104 | 59.776 | 25.631 | −7.574 | 1.00 | 36.83 | | O |
| ATOM | 853 | N | ASN | 105 | 61.077 | 23.998 | −8.450 | 1.00 | 36.83 | | N |
| ATOM | 854 | CA | ASN | 105 | 62.346 | 24.563 | −8.001 | 1.00 | 36.83 | | C |
| ATOM | 855 | CB | ASN | 105 | 63.525 | 23.678 | −8.433 | 1.00 | 36.83 | | C |
| ATOM | 856 | CG | ASN | 105 | 64.831 | 24.063 | −7.742 | 1.00 | 36.83 | | C |
| ATOM | 857 | OD1 | ASN | 105 | 64.957 | 23.942 | −6.519 | 1.00 | 36.83 | | O |
| ATOM | 858 | ND2 | ASN | 105 | 65.801 | 24.531 | −8.517 | 1.00 | 36.83 | | N |
| ATOM | 859 | C | ASN | 105 | 62.521 | 25.968 | −8.564 | 1.00 | 36.83 | | C |
| ATOM | 860 | O | ASN | 105 | 62.952 | 26.859 | −7.852 | 1.00 | 36.83 | | O |
| ATOM | 861 | N | LEU | 106 | 62.193 | 26.155 | −9.844 | 1.00 | 36.83 | | N |
| ATOM | 862 | CA | LEU | 106 | 62.285 | 27.476 | −10.466 | 1.00 | 36.83 | | C |
| ATOM | 863 | CB | LEU | 106 | 62.005 | 27.402 | −11.969 | 1.00 | 36.83 | | C |
| ATOM | 864 | CG | LEU | 106 | 63.103 | 26.829 | −12.862 | 1.00 | 36.83 | | C |
| ATOM | 865 | CD1 | LEU | 106 | 62.640 | 26.876 | −14.295 | 1.00 | 36.83 | | C |
| ATOM | 866 | CD2 | LEU | 106 | 64.397 | 27.630 | −12.710 | 1.00 | 36.83 | | C |
| ATOM | 867 | C | LEU | 106 | 61.277 | 28.421 | −9.810 | 1.00 | 36.83 | | C |
| ATOM | 868 | O | LEU | 106 | 61.545 | 29.611 | −9.638 | 1.00 | 36.83 | | O |
| ATOM | 869 | N | ARG | 107 | 60.115 | 27.881 | −9.452 | 1.00 | 36.83 | | N |
| ATOM | 870 | CA | ARG | 107 | 59.067 | 28.659 | −8.801 | 1.00 | 36.83 | | C |
| ATOM | 871 | CB | ARG | 107 | 57.803 | 27.799 | −8.612 | 1.00 | 36.83 | | C |
| ATOM | 872 | CG | ARG | 107 | 56.560 | 28.539 | −8.117 | 1.00 | 36.83 | | C |
| ATOM | 873 | CD | ARG | 107 | 55.595 | 27.574 | −7.402 | 1.00 | 36.83 | | C |
| ATOM | 874 | NE | ARG | 107 | 55.379 | 26.336 | −8.159 | 1.00 | 36.83 | | N |
| ATOM | 875 | CZ | ARG | 107 | 54.986 | 25.177 | −7.621 | 1.00 | 36.83 | | C |
| ATOM | 876 | NH1 | ARG | 107 | 54.761 | 25.088 | −6.316 | 1.00 | 36.83 | | N |
| ATOM | 877 | NH2 | ARG | 107 | 54.833 | 24.096 | −8.383 | 1.00 | 36.83 | | N |
| ATOM | 878 | C | ARG | 107 | 59.597 | 29.123 | −7.442 | 1.00 | 36.83 | | C |
| ATOM | 879 | O | ARG | 107 | 59.485 | 30.300 | −7.093 | 1.00 | 36.83 | | O |
| ATOM | 880 | N | VAL | 108 | 60.183 | 28.196 | −6.684 | 1.00 | 36.83 | | N |
| ATOM | 881 | CA | VAL | 108 | 60.723 | 28.518 | −5.364 | 1.00 | 36.83 | | C |
| ATOM | 882 | CB | VAL | 108 | 61.363 | 27.277 | −4.689 | 1.00 | 36.83 | | C |
| ATOM | 883 | CG1 | VAL | 108 | 62.029 | 27.682 | −3.381 | 1.00 | 36.83 | | C |
| ATOM | 884 | CG2 | VAL | 108 | 60.304 | 26.229 | −4.405 | 1.00 | 36.83 | | C |
| ATOM | 885 | C | VAL | 108 | 61.772 | 29.624 | −5.433 | 1.00 | 36.83 | | C |
| ATOM | 886 | O | VAL | 108 | 61.765 | 30.558 | −4.636 | 1.00 | 36.83 | | O |
| ATOM | 887 | N | ARG | 109 | 62.677 | 29.521 | −6.388 | 1.00 | 36.83 | | N |
| ATOM | 888 | CA | ARG | 109 | 63.713 | 30.533 | −6.518 | 1.00 | 36.83 | | C |
| ATOM | 889 | CB | ARG | 109 | 64.823 | 30.023 | −7.452 | 1.00 | 36.83 | | C |
| ATOM | 890 | CG | ARG | 109 | 65.545 | 28.783 | −6.893 | 1.00 | 36.83 | | C |
| ATOM | 891 | CD | ARG | 109 | 66.640 | 28.268 | −7.824 | 1.00 | 36.83 | | C |
| ATOM | 892 | NE | ARG | 109 | 67.650 | 29.288 | −8.094 | 1.00 | 36.83 | | N |
| ATOM | 893 | CZ | ARG | 109 | 68.484 | 29.775 | −7.177 | 1.00 | 36.83 | | C |
| ATOM | 894 | NH1 | ARG | 109 | 68.443 | 29.337 | −5.921 | 1.00 | 36.83 | | N |
| ATOM | 895 | NH2 | ARG | 109 | 69.357 | 30.710 | −7.513 | 1.00 | 36.83 | | N |
| ATOM | 896 | C | ARG | 109 | 63.127 | 31.863 | −6.993 | 1.00 | 36.83 | | C |
| ATOM | 897 | O | ARG | 109 | 63.443 | 32.916 | −6.451 | 1.00 | 36.83 | | O |
| ATOM | 898 | N | TYR | 110 | 62.237 | 31.804 | −7.977 | 1.00 | 36.83 | | N |
| ATOM | 899 | CA | TYR | 110 | 61.597 | 32.997 | −8.525 | 1.00 | 36.83 | | C |
| ATOM | 900 | CB | TYR | 110 | 60.685 | 32.616 | −9.695 | 1.00 | 36.83 | | C |
| ATOM | 901 | CG | TYR | 110 | 60.200 | 33.786 | −10.530 | 1.00 | 36.83 | | C |
| ATOM | 902 | CD1 | TYR | 110 | 61.045 | 34.418 | −11.445 | 1.00 | 36.83 | | C |
| ATOM | 903 | CE1 | TYR | 110 | 60.603 | 35.471 | −12.228 | 1.00 | 36.83 | | C |
| ATOM | 904 | CD2 | TYR | 110 | 58.892 | 34.249 | −10.421 | 1.00 | 36.83 | | C |
| ATOM | 905 | CE2 | TYR | 110 | 58.435 | 35.312 | −11.208 | 1.00 | 36.83 | | C |
| ATOM | 906 | CZ | TYR | 110 | 59.294 | 35.913 | −12.105 | 1.00 | 36.83 | | C |
| ATOM | 907 | OH | TYR | 110 | 58.846 | 36.954 | −12.881 | 1.00 | 36.83 | | O |
| ATOM | 908 | C | TYR | 110 | 60.779 | 33.714 | −7.451 | 1.00 | 36.83 | | C |
| ATOM | 909 | O | TYR | 110 | 60.729 | 34.943 | −7.423 | 1.00 | 36.83 | | O |
| ATOM | 910 | N | ASN | 111 | 60.140 | 32.940 | −6.574 | 1.00 | 36.83 | | N |
| ATOM | 911 | CA | ASN | 111 | 59.309 | 33.503 | −5.509 | 1.00 | 36.83 | | C |
| ATOM | 912 | CB | ASN | 111 | 58.598 | 32.395 | −4.739 | 1.00 | 36.83 | | C |
| ATOM | 913 | CG | ASN | 111 | 57.522 | 31.711 | −5.568 | 1.00 | 36.83 | | C |
| ATOM | 914 | OD1 | ASN | 111 | 56.714 | 32.370 | −6.222 | 1.00 | 36.83 | | O |
| ATOM | 915 | ND2 | ASN | 111 | 57.503 | 30.385 | −5.536 | 1.00 | 36.83 | | N |
| ATOM | 916 | C | ASN | 111 | 60.076 | 34.389 | −4.541 | 1.00 | 36.83 | | C |
| ATOM | 917 | O | ASN | 111 | 59.479 | 35.188 | −3.838 | 1.00 | 36.83 | | O |
| ATOM | 918 | N | GLN | 112 | 61.394 | 34.226 | −4.469 | 1.00 | 36.83 | | N |
| ATOM | 919 | CA | GLN | 112 | 62.176 | 35.099 | −3.617 | 1.00 | 36.83 | | C |
| ATOM | 920 | CB | GLN | 112 | 62.776 | 34.339 | −2.404 | 1.00 | 36.83 | | C |
| ATOM | 921 | CG | GLN | 112 | 63.784 | 33.225 | −2.648 | 1.00 | 36.83 | | C |
| ATOM | 922 | CD | GLN | 112 | 64.309 | 32.634 | −1.321 | 1.00 | 36.83 | | C |
| ATOM | 923 | OE1 | GLN | 112 | 63.567 | 32.011 | −0.561 | 1.00 | 36.83 | | O |
| ATOM | 924 | NE2 | GLN | 112 | 65.585 | 32.848 | −1.043 | 1.00 | 36.83 | | N |
| ATOM | 925 | C | GLN | 112 | 63.233 | 35.802 | −4.497 | 1.00 | 36.83 | | C |
| ATOM | 926 | O | GLN | 112 | 64.411 | 35.933 | −4.157 | 1.00 | 36.83 | | O |
| ATOM | 927 | N | ASP | 113 | 62.742 | 36.239 | −5.657 | 1.00 | 36.83 | | N |
| ATOM | 928 | CA | ASP | 113 | 63.506 | 36.948 | −6.681 | 1.00 | 36.83 | | C |
| ATOM | 929 | CB | ASP | 113 | 63.696 | 38.408 | −6.273 | 1.00 | 36.83 | | C |
| ATOM | 930 | CG | ASP | 113 | 62.381 | 39.143 | −6.150 | 1.00 | 36.83 | | C |
| ATOM | 931 | OD1 | ASP | 113 | 61.424 | 38.782 | −6.880 | 1.00 | 36.83 | | O |
| ATOM | 932 | OD2 | ASP | 113 | 62.303 | 40.080 | −5.328 | 1.00 | 36.83 | | O |
| ATOM | 933 | C | ASP | 113 | 64.841 | 36.379 | −7.143 | 1.00 | 36.83 | | C |
| ATOM | 934 | O | ASP | 113 | 65.732 | 37.132 | −7.526 | 1.00 | 36.83 | | O |
| ATOM | 935 | N | LEU | 114 | 64.989 | 35.060 | −7.113 | 1.00 | 36.83 | | N |
| ATOM | 936 | CA | LEU | 114 | 66.218 | 34.442 | −7.597 | 1.00 | 36.83 | | C |
| ATOM | 937 | CB | LEU | 114 | 66.569 | 33.216 | −6.767 | 1.00 | 36.83 | | C |
| ATOM | 938 | CG | LEU | 114 | 66.912 | 33.403 | −5.285 | 1.00 | 36.83 | | C |
| ATOM | 939 | CD1 | LEU | 114 | 67.328 | 32.039 | −4.730 | 1.00 | 36.83 | | C |
| ATOM | 940 | CD2 | LEU | 114 | 68.040 | 34.431 | −5.087 | 1.00 | 36.83 | | C |
| ATOM | 941 | C | LEU | 114 | 65.897 | 34.028 | −9.039 | 1.00 | 36.83 | | C |
| ATOM | 942 | O | LEU | 114 | 65.242 | 33.019 | −9.261 | 1.00 | 36.83 | | O |
| ATOM | 943 | N | ILE | 115 | 66.354 | 34.808 | −10.015 | 1.00 | 36.83 | | N |
| ATOM | 944 | CA | ILE | 115 | 66.045 | 34.507 | −11.407 | 1.00 | 36.83 | | C |
| ATOM | 945 | CB | ILE | 115 | 65.921 | 35.798 | −12.227 | 1.00 | 36.83 | | C |
| ATOM | 946 | CG2 | ILE | 115 | 64.885 | 36.709 | −11.575 | 1.00 | 36.83 | | C |
| ATOM | 947 | CG1 | ILE | 115 | 67.274 | 36.506 | −12.314 | 1.00 | 36.83 | | C |
| ATOM | 948 | CD1 | ILE | 115 | 67.230 | 37.808 | −13.079 | 1.00 | 36.83 | | C |
| ATOM | 949 | C | ILE | 115 | 66.973 | 33.548 | −12.131 | 1.00 | 36.83 | | C |
| ATOM | 950 | O | ILE | 115 | 66.577 | 32.933 | −13.124 | 1.00 | 36.83 | | O |
| ATOM | 951 | N | TYR | 116 | 68.202 | 33.414 | −11.650 | 1.00 | 36.83 | | N |
| ATOM | 952 | CA | TYR | 116 | 69.144 | 32.506 | −12.282 | 1.00 | 36.83 | | C |
| ATOM | 953 | CB | TYR | 116 | 70.541 | 33.132 | −12.322 | 1.00 | 36.83 | | C |
| ATOM | 954 | CG | TYR | 116 | 70.612 | 34.389 | −13.157 | 1.00 | 36.83 | | C |
| ATOM | 955 | CD1 | TYR | 116 | 70.478 | 34.337 | −14.546 | 1.00 | 36.83 | | C |
| ATOM | 956 | CE1 | TYR | 116 | 70.501 | 35.508 | −15.317 | 1.00 | 36.83 | | C |
| ATOM | 957 | CD2 | TYR | 116 | 70.775 | 35.636 | −12.558 | 1.00 | 36.83 | | C |
| ATOM | 958 | CE2 | TYR | 116 | 70.799 | 36.801 | −13.313 | 1.00 | 36.83 | | C |
| ATOM | 959 | CZ | TYR | 116 | 70.657 | 36.733 | −14.695 | 1.00 | 36.83 | | C |
| ATOM | 960 | OH | TYR | 116 | 70.635 | 37.889 | −15.439 | 1.00 | 36.83 | | O |
| ATOM | 961 | C | TYR | 116 | 69.193 | 31.154 | −11.567 | 1.00 | 36.83 | | C |
| ATOM | 962 | O | TYR | 116 | 69.184 | 31.081 | −10.335 | 1.00 | 36.83 | | O |
| ATOM | 963 | N | THR | 117 | 69.224 | 30.091 | −12.368 | 1.00 | 36.83 | | N |
| ATOM | 964 | CA | THR | 117 | 69.293 | 28.708 | −11.898 | 1.00 | 36.83 | | C |
| ATOM | 965 | CB | THR | 117 | 67.900 | 28.104 | −11.680 | 1.00 | 36.83 | | C |
| ATOM | 966 | OG1 | THR | 117 | 67.087 | 29.010 | −10.925 | 1.00 | 36.83 | | O |
| ATOM | 967 | CG2 | THR | 117 | 68.016 | 26.787 | −10.911 | 1.00 | 36.83 | | C |
| ATOM | 968 | C | THR | 117 | 69.992 | 27.874 | −12.986 | 1.00 | 36.83 | | C |
| ATOM | 969 | O | THR | 117 | 69.705 | 28.035 | −14.168 | 1.00 | 36.83 | | O |
| ATOM | 970 | N | TYR | 118 | 70.917 | 27.005 | −12.594 | 1.00 | 36.83 | | N |
| ATOM | 971 | CA | TYR | 118 | 71.605 | 26.157 | −13.560 | 1.00 | 36.83 | | C |
| ATOM | 972 | CB | TYR | 118 | 73.026 | 25.816 | −13.104 | 1.00 | 36.83 | | C |
| ATOM | 973 | CG | TYR | 118 | 73.973 | 26.979 | −13.045 | 1.00 | 36.83 | | C |
| ATOM | 974 | CD1 | TYR | 118 | 74.282 | 27.710 | −14.188 | 1.00 | 36.83 | | C |
| ATOM | 975 | CE1 | TYR | 118 | 75.160 | 28.784 | −14.127 | 1.00 | 36.83 | | C |
| ATOM | 976 | CD2 | TYR | 118 | 74.566 | 27.354 | −11.836 | 1.00 | 36.83 | | C |
| ATOM | 977 | CE2 | TYR | 118 | 75.435 | 28.424 | −11.767 | 1.00 | 36.83 | | C |
| ATOM | 978 | CZ | TYR | 118 | 75.732 | 29.135 | −12.910 | 1.00 | 36.83 | | C |
| ATOM | 979 | OH | TYR | 118 | 76.613 | 30.189 | −12.840 | 1.00 | 36.83 | | O |
| ATOM | 980 | C | TYR | 118 | 70.862 | 24.842 | −13.775 | 1.00 | 36.83 | | C |
| ATOM | 981 | O | TYR | 118 | 70.203 | 24.328 | −12.879 | 1.00 | 36.83 | | O |
| ATOM | 982 | N | SER | 119 | 70.990 | 24.313 | −14.983 | 1.00 | 36.83 | | N |
| ATOM | 983 | CA | SER | 119 | 70.389 | 23.043 | −15.366 | 1.00 | 36.83 | | C |
| ATOM | 984 | CB | SER | 119 | 69.391 | 23.221 | −16.506 | 1.00 | 36.83 | | C |
| ATOM | 985 | OG | SER | 119 | 68.342 | 24.093 | −16.132 | 1.00 | 36.83 | | O |
| ATOM | 986 | C | SER | 119 | 71.557 | 22.221 | −15.858 | 1.00 | 36.83 | | C |
| ATOM | 987 | O | SER | 119 | 71.471 | 21.557 | −16.890 | 1.00 | 36.83 | | O |
| ATOM | 988 | N | GLY | 120 | 72.651 | 22.272 | −15.106 | 1.00 | 36.83 | | N |
| ATOM | 989 | CA | GLY | 120 | 73.842 | 21.558 | −15.496 | 1.00 | 36.83 | | C |
| ATOM | 990 | C | GLY | 120 | 74.817 | 22.531 | −16.133 | 1.00 | 36.83 | | C |
| ATOM | 991 | O | GLY | 120 | 75.213 | 23.524 | −15.515 | 1.00 | 36.83 | | O |
| ATOM | 992 | N | LEU | 121 | 75.198 | 22.259 | −17.376 | 1.00 | 36.83 | | N |
| ATOM | 993 | CA | LEU | 121 | 76.142 | 23.105 | −18.085 | 1.00 | 36.83 | | C |
| ATOM | 994 | CB | LEU | 121 | 76.835 | 22.295 | −19.187 | 1.00 | 36.83 | | C |
| ATOM | 995 | CG | LEU | 121 | 78.066 | 21.507 | −18.706 | 1.00 | 36.83 | | C |
| ATOM | 996 | CD1 | LEU | 121 | 78.623 | 20.668 | −19.852 | 1.00 | 36.83 | | C |
| ATOM | 997 | CD2 | LEU | 121 | 79.133 | 22.479 | −18.184 | 1.00 | 36.83 | | C |
| ATOM | 998 | C | LEU | 121 | 75.614 | 24.424 | −18.663 | 1.00 | 36.83 | | C |
| ATOM | 999 | O | LEU | 121 | 76.413 | 25.262 | −19.085 | 1.00 | 36.83 | | O |
| ATOM | 1000 | N | PHE | 122 | 74.295 | 24.616 | −18.703 | 1.00 | 36.83 | | N |
| ATOM | 1001 | CA | PHE | 122 | 73.744 | 25.877 | −19.204 | 1.00 | 36.83 | | C |
| ATOM | 1002 | CB | PHE | 122 | 72.883 | 25.675 | −20.460 | 1.00 | 36.83 | | C |
| ATOM | 1003 | CG | PHE | 122 | 71.812 | 24.626 | −20.318 | 1.00 | 36.83 | | C |
| ATOM | 1004 | CD1 | PHE | 122 | 72.065 | 23.303 | −20.666 | 1.00 | 36.83 | | C |
| ATOM | 1005 | CD2 | PHE | 122 | 70.544 | 24.964 | −19.855 | 1.00 | 36.83 | | C |
| ATOM | 1006 | CE1 | PHE | 122 | 71.068 | 22.337 | −20.557 | 1.00 | 36.83 | | C |
| ATOM | 1007 | CE2 | PHE | 122 | 69.533 | 23.996 | −19.743 | 1.00 | 36.83 | | C |
| ATOM | 1008 | CZ | PHE | 122 | 69.798 | 22.686 | −20.095 | 1.00 | 36.83 | | C |
| ATOM | 1009 | C | PHE | 122 | 72.927 | 26.574 | −18.116 | 1.00 | 36.83 | | C |
| ATOM | 1010 | O | PHE | 122 | 72.455 | 25.931 | −17.184 | 1.00 | 36.83 | | O |
| ATOM | 1011 | N | LEU | 123 | 72.769 | 27.889 | −18.245 | 1.00 | 36.83 | | N |
| ATOM | 1012 | CA | LEU | 123 | 72.043 | 28.698 | −17.272 | 1.00 | 36.83 | | C |
| ATOM | 1013 | CB | LEU | 123 | 72.787 | 30.028 | −17.095 | 1.00 | 36.83 | | C |
| ATOM | 1014 | CG | LEU | 123 | 72.194 | 31.084 | −16.162 | 1.00 | 36.83 | | C |
| ATOM | 1015 | CD1 | LEU | 123 | 72.138 | 30.560 | −14.724 | 1.00 | 36.83 | | C |
| ATOM | 1016 | CD2 | LEU | 123 | 73.052 | 32.349 | −16.243 | 1.00 | 36.83 | | C |
| ATOM | 1017 | C | LEU | 123 | 70.587 | 28.980 | −17.668 | 1.00 | 36.83 | | C |
| ATOM | 1018 | O | LEU | 123 | 70.292 | 29.127 | −18.840 | 1.00 | 36.83 | | O |
| ATOM | 1019 | N | VAL | 124 | 69.683 | 29.059 | −16.697 | 1.00 | 36.83 | | N |
| ATOM | 1020 | CA | VAL | 124 | 68.275 | 29.367 | −16.988 | 1.00 | 36.83 | | C |
| ATOM | 1021 | CB | VAL | 124 | 67.302 | 28.265 | −16.446 | 1.00 | 36.83 | | C |
| ATOM | 1022 | CG1 | VAL | 124 | 65.856 | 28.743 | −16.523 | 1.00 | 36.83 | | C |
| ATOM | 1023 | CG2 | VAL | 124 | 67.464 | 26.973 | −17.260 | 1.00 | 36.83 | | C |
| ATOM | 1024 | C | VAL | 124 | 67.965 | 30.706 | −16.330 | 1.00 | 36.83 | | C |
| ATOM | 1025 | O | VAL | 124 | 68.350 | 30.945 | −15.184 | 1.00 | 36.83 | | O |
| ATOM | 1026 | N | ALA | 125 | 67.280 | 31.580 | −17.055 | 1.00 | 36.83 | | N |
| ATOM | 1027 | CA | ALA | 125 | 66.947 | 32.912 | −16.552 | 1.00 | 36.83 | | C |
| ATOM | 1028 | CB | ALA | 125 | 67.766 | 33.943 | −17.289 | 1.00 | 36.83 | | C |
| ATOM | 1029 | C | ALA | 125 | 65.466 | 33.221 | −16.729 | 1.00 | 36.83 | | C |
| ATOM | 1030 | O | ALA | 125 | 64.980 | 33.241 | −17.845 | 1.00 | 36.83 | | O |
| ATOM | 1031 | N | VAL | 126 | 64.757 | 33.477 | −15.633 | 1.00 | 36.83 | | N |
| ATOM | 1032 | CA | VAL | 126 | 63.326 | 33.770 | −15.706 | 1.00 | 36.83 | | C |
| ATOM | 1033 | CB | VAL | 126 | 62.524 | 32.934 | −14.661 | 1.00 | 36.83 | | C |
| ATOM | 1034 | CG1 | VAL | 126 | 61.031 | 33.108 | −14.883 | 1.00 | 36.83 | | C |
| ATOM | 1035 | CG2 | VAL | 126 | 62.905 | 31.458 | −14.760 | 1.00 | 36.83 | | C |
| ATOM | 1036 | C | VAL | 126 | 63.090 | 35.263 | −15.477 | 1.00 | 36.83 | | C |
| ATOM | 1037 | O | VAL | 126 | 63.373 | 35.793 | −14.399 | 1.00 | 36.83 | | O |
| ATOM | 1038 | N | ASN | 127 | 62.576 | 35.929 | −16.505 | 1.00 | 36.83 | | N |
| ATOM | 1039 | CA | ASN | 127 | 62.326 | 37.372 | −16.471 | 1.00 | 36.83 | | C |
| ATOM | 1040 | CB | ASN | 127 | 61.567 | 37.815 | −17.730 | 1.00 | 36.83 | | C |
| ATOM | 1041 | CG | ASN | 127 | 61.635 | 39.326 | −17.958 | 1.00 | 36.83 | | C |
| ATOM | 1042 | OD1 | ASN | 127 | 61.703 | 40.108 | −17.009 | 1.00 | 36.83 | | O |
| ATOM | 1043 | ND2 | ASN | 127 | 61.602 | 39.734 | −19.215 | 1.00 | 36.83 | | N |
| ATOM | 1044 | C | ASN | 127 | 61.565 | 37.863 | −15.245 | 1.00 | 36.83 | | C |
| ATOM | 1045 | O | ASN | 127 | 60.409 | 37.494 | −15.024 | 1.00 | 36.83 | | O |
| ATOM | 1046 | N | PRO | 128 | 62.204 | 38.720 | −14.436 | 1.00 | 36.83 | | N |
| ATOM | 1047 | CD | PRO | 128 | 63.605 | 39.176 | −14.516 | 1.00 | 36.83 | | C |
| ATOM | 1048 | CA | PRO | 128 | 61.548 | 39.247 | −13.241 | 1.00 | 36.83 | | C |
| ATOM | 1049 | CB | PRO | 128 | 62.716 | 39.821 | −12.435 | 1.00 | 36.83 | | C |
| ATOM | 1050 | CG | PRO | 128 | 63.644 | 40.320 | −13.520 | 1.00 | 36.83 | | C |
| ATOM | 1051 | C | PRO | 128 | 60.489 | 40.306 | −13.561 | 1.00 | 36.83 | | C |
| ATOM | 1052 | O | PRO | 128 | 59.469 | 40.382 | −12.895 | 1.00 | 36.83 | | O |
| ATOM | 1053 | N | PHE | 129 | 60.725 | 41.109 | −14.594 | 1.00 | 36.83 | | N |
| ATOM | 1054 | CA | PHE | 129 | 59.789 | 42.180 | −14.947 | 1.00 | 36.83 | | C |
| ATOM | 1055 | CB | PHE | 129 | 58.397 | 41.641 | −15.280 | 1.00 | 36.83 | | C |
| ATOM | 1056 | CG | PHE | 129 | 58.248 | 41.220 | −16.707 | 1.00 | 36.83 | | C |
| ATOM | 1057 | CD1 | PHE | 129 | 58.568 | 42.099 | −17.738 | 1.00 | 36.83 | | C |
| ATOM | 1058 | CD2 | PHE | 129 | 57.828 | 39.937 | −17.026 | 1.00 | 36.83 | | C |
| ATOM | 1059 | CE1 | PHE | 129 | 58.477 | 41.701 | −19.076 | 1.00 | 36.83 | | C |
| ATOM | 1060 | CE2 | PHE | 129 | 57.734 | 39.531 | −18.345 | 1.00 | 36.83 | | C |
| ATOM | 1061 | CZ | PHE | 129 | 58.061 | 40.414 | −19.380 | 1.00 | 36.83 | | C |
| ATOM | 1062 | C | PHE | 129 | 59.707 | 43.130 | −13.774 | 1.00 | 36.83 | | C |
| ATOM | 1063 | O | PHE | 129 | 58.644 | 43.621 | −13.415 | 1.00 | 36.83 | | O |
| ATOM | 1064 | N | LYS | 130 | 60.861 | 43.350 | −13.166 | 1.00 | 36.83 | | N |
| ATOM | 1065 | CA | LYS | 130 | 61.009 | 44.249 | −12.036 | 1.00 | 36.83 | | C |
| ATOM | 1066 | CB | LYS | 130 | 60.292 | 43.703 | −10.790 | 1.00 | 36.83 | | C |
| ATOM | 1067 | CG | LYS | 130 | 61.175 | 43.183 | −9.664 | 1.00 | 36.83 | | C |
| ATOM | 1068 | CD | LYS | 130 | 60.309 | 42.951 | −8.415 | 1.00 | 36.83 | | C |
| ATOM | 1069 | CE | LYS | 130 | 61.023 | 42.190 | −7.300 | 1.00 | 36.83 | | C |
| ATOM | 1070 | NZ | LYS | 130 | 60.123 | 42.008 | −6.119 | 1.00 | 36.83 | | N |
| ATOM | 1071 | C | LYS | 130 | 62.498 | 44.335 | −11.803 | 1.00 | 36.83 | | C |
| ATOM | 1072 | O | LYS | 130 | 63.224 | 43.393 | −12.097 | 1.00 | 36.83 | | O |
| ATOM | 1073 | N | ILE | 131 | 62.955 | 45.469 | −11.295 | 1.00 | 36.83 | | N |
| ATOM | 1074 | CA | ILE | 131 | 64.370 | 45.644 | −11.054 | 1.00 | 36.83 | | C |
| ATOM | 1075 | CB | ILE | 131 | 64.712 | 47.133 | −10.876 | 1.00 | 36.83 | | C |
| ATOM | 1076 | CG2 | ILE | 131 | 66.120 | 47.265 | −10.359 | 1.00 | 36.83 | | C |
| ATOM | 1077 | CG1 | ILE | 131 | 64.539 | 47.872 | −12.209 | 1.00 | 36.83 | | C |
| ATOM | 1078 | CD1 | ILE | 131 | 64.602 | 49.391 | −12.104 | 1.00 | 36.83 | | C |
| ATOM | 1079 | C | ILE | 131 | 64.823 | 44.881 | −9.820 | 1.00 | 36.83 | | C |
| ATOM | 1080 | O | ILE | 131 | 64.083 | 44.751 | −8.846 | 1.00 | 36.83 | | O |
| ATOM | 1081 | N | ILE | 132 | 66.048 | 44.376 | −9.879 | 1.00 | 36.83 | | N |
| ATOM | 1082 | CA | ILE | 132 | 66.631 | 43.639 | −8.778 | 1.00 | 36.83 | | C |
| ATOM | 1083 | CB | ILE | 132 | 66.496 | 42.127 | −9.004 | 1.00 | 36.83 | | C |
| ATOM | 1084 | CG2 | ILE | 132 | 67.270 | 41.373 | −7.940 | 1.00 | 36.83 | | C |
| ATOM | 1085 | CG1 | ILE | 132 | 65.010 | 41.737 | −9.005 | 1.00 | 36.83 | | C |
| ATOM | 1086 | CD1 | ILE | 132 | 64.759 | 40.285 | −9.379 | 1.00 | 36.83 | | C |
| ATOM | 1087 | C | ILE | 132 | 68.109 | 44.027 | −8.692 | 1.00 | 36.83 | | C |
| ATOM | 1088 | O | ILE | 132 | 68.835 | 43.951 | −9.681 | 1.00 | 36.83 | | O |
| ATOM | 1089 | N | PRO | 133 | 68.569 | 44.437 | −7.493 | 1.00 | 36.83 | | N |
| ATOM | 1090 | CD | PRO | 133 | 67.681 | 44.505 | −6.317 | 1.00 | 36.83 | | C |
| ATOM | 1091 | CA | PRO | 133 | 69.928 | 44.875 | −7.126 | 1.00 | 36.83 | | C |
| ATOM | 1092 | CB | PRO | 133 | 69.793 | 45.218 | −5.640 | 1.00 | 36.83 | | C |
| ATOM | 1093 | CG | PRO | 133 | 68.362 | 45.543 | −5.473 | 1.00 | 36.83 | | C |
| ATOM | 1094 | C | PRO | 133 | 71.117 | 43.936 | −7.341 | 1.00 | 36.83 | | C |
| ATOM | 1095 | O | PRO | 133 | 72.000 | 43.894 | −6.493 | 1.00 | 36.83 | | O |
| ATOM | 1096 | N | ILE | 134 | 71.193 | 43.204 | −8.447 | 1.00 | 36.83 | | N |
| ATOM | 1097 | CA | ILE | 134 | 72.343 | 42.312 | −8.595 | 1.00 | 36.83 | | C |
| ATOM | 1098 | CB | ILE | 134 | 71.885 | 40.837 | −8.735 | 1.00 | 36.83 | | C |
| ATOM | 1099 | CG2 | ILE | 134 | 71.073 | 40.450 | −7.528 | 1.00 | 36.83 | | C |
| ATOM | 1100 | CG1 | ILE | 134 | 71.070 | 40.653 | −10.022 | 1.00 | 36.83 | | C |
| ATOM | 1101 | CD1 | ILE | 134 | 70.596 | 39.230 | −10.276 | 1.00 | 36.83 | | C |
| ATOM | 1102 | C | ILE | 134 | 73.309 | 42.633 | −9.727 | 1.00 | 36.83 | | C |
| ATOM | 1103 | O | ILE | 134 | 74.186 | 41.829 | −10.043 | 1.00 | 36.83 | | O |
| ATOM | 1104 | N | TYR | 135 | 73.188 | 43.812 | −10.321 | 1.00 | 36.83 | | N |
| ATOM | 1105 | CA | TYR | 135 | 74.065 | 44.157 | −11.433 | 1.00 | 36.83 | | C |
| ATOM | 1106 | CB | TYR | 135 | 73.221 | 44.385 | −12.693 | 1.00 | 36.83 | | C |
| ATOM | 1107 | CG | TYR | 135 | 72.284 | 43.240 | −13.029 | 1.00 | 36.83 | | C |
| ATOM | 1108 | CD1 | TYR | 135 | 72.774 | 42.027 | −13.494 | 1.00 | 36.83 | | C |
| ATOM | 1109 | CE1 | TYR | 135 | 71.905 | 40.975 | −13.829 | 1.00 | 36.83 | | C |
| ATOM | 1110 | CD2 | TYR | 135 | 70.900 | 43.386 | −12.898 | 1.00 | 36.83 | | C |
| ATOM | 1111 | CE2 | TYR | 135 | 70.024 | 42.348 | −13.230 | 1.00 | 36.83 | | C |
| ATOM | 1112 | CZ | TYR | 135 | 70.534 | 41.150 | −13.696 | 1.00 | 36.83 | | C |
| ATOM | 1113 | OH | TYR | 135 | 69.678 | 40.135 | −14.036 | 1.00 | 36.83 | | O |
| ATOM | 1114 | C | TYR | 135 | 74.953 | 45.377 | −11.173 | 1.00 | 36.83 | | C |
| ATOM | 1115 | O | TYR | 135 | 75.142 | 46.211 | −12.056 | 1.00 | 36.83 | | O |
| ATOM | 1116 | N | THR | 136 | 75.493 | 45.474 | −9.959 | 1.00 | 36.83 | | N |
| ATOM | 1117 | CA | THR | 136 | 76.356 | 46.589 | −9.588 | 1.00 | 36.83 | | C |
| ATOM | 1118 | CB | THR | 136 | 76.101 | 47.023 | −8.138 | 1.00 | 36.83 | | C |
| ATOM | 1119 | OG1 | THR | 136 | 76.396 | 45.937 | −7.257 | 1.00 | 36.83 | | O |
| ATOM | 1120 | CG2 | THR | 136 | 74.659 | 47.437 | −7.952 | 1.00 | 36.83 | | C |
| ATOM | 1121 | C | THR | 136 | 77.825 | 46.197 | −9.710 | 1.00 | 36.83 | | C |
| ATOM | 1122 | O | THR | 136 | 78.148 | 45.028 | −9.991 | 1.00 | 36.83 | | O |
| ATOM | 1123 | N | GLN | 137 | 78.717 | 47.165 | −9.490 | 1.00 | 36.83 | | N |
| ATOM | 1124 | CA | GLN | 137 | 80.156 | 46.893 | −9.560 | 1.00 | 36.83 | | C |
| ATOM | 1125 | CB | GLN | 137 | 80.989 | 48.176 | −9.423 | 1.00 | 36.83 | | C |
| ATOM | 1126 | CG | GLN | 137 | 81.600 | 48.676 | −10.728 | 1.00 | 36.83 | | C |
| ATOM | 1127 | CD | GLN | 137 | 82.341 | 47.595 | −11.512 | 1.00 | 36.83 | | C |
| ATOM | 1128 | OE1 | GLN | 137 | 83.181 | 46.870 | −10.977 | 1.00 | 36.83 | | O |
| ATOM | 1129 | NE2 | GLN | 137 | 82.034 | 47.498 | −12.792 | 1.00 | 36.83 | | N |
| ATOM | 1130 | C | GLN | 137 | 80.543 | 45.933 | −8.450 | 1.00 | 36.83 | | C |
| ATOM | 1131 | O | GLN | 137 | 81.429 | 45.086 | −8.629 | 1.00 | 36.83 | | O |
| ATOM | 1132 | N | GLU | 138 | 79.886 | 46.053 | −7.303 | 1.00 | 36.83 | | N |
| ATOM | 1133 | CA | GLU | 138 | 80.190 | 45.151 | −6.199 | 1.00 | 36.83 | | C |
| ATOM | 1134 | CB | GLU | 138 | 79.427 | 45.544 | −4.931 | 1.00 | 36.83 | | C |
| ATOM | 1135 | CG | GLU | 138 | 79.983 | 46.766 | −4.206 | 1.00 | 36.83 | | C |
| ATOM | 1136 | CD | GLU | 138 | 79.915 | 48.014 | −5.061 | 1.00 | 36.83 | | C |
| ATOM | 1137 | OE1 | GLU | 138 | 78.816 | 48.295 | −5.618 | 1.00 | 36.83 | | O |
| ATOM | 1138 | OE2 | GLU | 138 | 80.960 | 48.708 | −5.180 | 1.00 | 36.83 | | O |
| ATOM | 1139 | C | GLU | 138 | 79.839 | 43.719 | −6.577 | 1.00 | 36.83 | | C |
| ATOM | 1140 | O | GLU | 138 | 80.511 | 42.785 | −6.160 | 1.00 | 36.83 | | O |
| ATOM | 1141 | N | MET | 139 | 78.781 | 43.535 | −7.356 | 1.00 | 36.83 | | N |
| ATOM | 1142 | CA | MET | 139 | 78.412 | 42.185 | −7.761 | 1.00 | 36.83 | | C |
| ATOM | 1143 | CB | MET | 139 | 77.029 | 42.184 | −8.410 | 1.00 | 36.83 | | C |
| ATOM | 1144 | CG | MET | 139 | 75.885 | 42.439 | −7.405 | 1.00 | 36.83 | | C |
| ATOM | 1145 | SD | MET | 139 | 75.810 | 41.167 | −6.118 | 1.00 | 36.83 | | S |
| ATOM | 1146 | CE | MET | 139 | 74.556 | 41.783 | −5.059 | 1.00 | 36.83 | | C |
| ATOM | 1147 | C | MET | 139 | 79.476 | 41.639 | −8.710 | 1.00 | 36.83 | | C |
| ATOM | 1148 | O | MET | 139 | 79.948 | 40.509 | −8.552 | 1.00 | 36.83 | | O |
| ATOM | 1149 | N | VAL | 140 | 79.865 | 42.454 | −9.682 | 1.00 | 36.83 | | N |
| ATOM | 1150 | CA | VAL | 140 | 80.894 | 42.075 | −10.635 | 1.00 | 36.83 | | C |
| ATOM | 1151 | CB | VAL | 140 | 81.254 | 43.256 | −11.560 | 1.00 | 36.83 | | C |
| ATOM | 1152 | CG1 | VAL | 140 | 82.410 | 42.869 | −12.486 | 1.00 | 36.83 | | C |
| ATOM | 1153 | CG2 | VAL | 140 | 80.023 | 43.678 | −12.378 | 1.00 | 36.83 | | C |
| ATOM | 1154 | C | VAL | 140 | 82.167 | 41.615 | −9.915 | 1.00 | 36.83 | | C |
| ATOM | 1155 | O | VAL | 140 | 82.705 | 40.544 | −10.209 | 1.00 | 36.83 | | O |
| ATOM | 1156 | N | ASP | 141 | 82.643 | 42.421 | −8.973 | 1.00 | 36.83 | | N |
| ATOM | 1157 | CA | ASP | 141 | 83.859 | 42.095 | −8.228 | 1.00 | 36.83 | | C |
| ATOM | 1158 | CB | ASP | 141 | 84.157 | 43.188 | −7.211 | 1.00 | 36.83 | | C |
| ATOM | 1159 | CG | ASP | 141 | 84.544 | 44.491 | −7.865 | 1.00 | 36.83 | | C |
| ATOM | 1160 | OD1 | ASP | 141 | 84.623 | 45.503 | −7.132 | 1.00 | 36.83 | | O |
| ATOM | 1161 | OD2 | ASP | 141 | 84.769 | 44.498 | −9.105 | 1.00 | 36.83 | | O |
| ATOM | 1162 | C | ASP | 141 | 83.752 | 40.756 | −7.509 | 1.00 | 36.83 | | C |
| ATOM | 1163 | O | ASP | 141 | 84.730 | 40.008 | −7.398 | 1.00 | 36.83 | | O |
| ATOM | 1164 | N | ILE | 142 | 82.560 | 40.467 | −7.009 | 1.00 | 36.83 | | N |
| ATOM | 1165 | CA | ILE | 142 | 82.331 | 39.212 | −6.324 | 1.00 | 36.83 | | C |
| ATOM | 1166 | CB | ILE | 142 | 80.903 | 39.146 | −5.743 | 1.00 | 36.83 | | C |
| ATOM | 1167 | CG2 | ILE | 142 | 80.571 | 37.722 | −5.320 | 1.00 | 36.83 | | C |
| ATOM | 1168 | CG1 | ILE | 142 | 80.777 | 40.120 | −4.568 | 1.00 | 36.83 | | C |
| ATOM | 1169 | CD1 | ILE | 142 | 81.798 | 39.875 | −3.462 | 1.00 | 36.83 | | C |
| ATOM | 1170 | C | ILE | 142 | 82.528 | 38.020 | −7.263 | 1.00 | 36.83 | | C |
| ATOM | 1171 | O | ILE | 142 | 83.073 | 37.002 | −6.846 | 1.00 | 36.83 | | O |
| ATOM | 1172 | N | PHE | 143 | 82.102 | 38.143 | −8.518 | 1.00 | 36.83 | | N |
| ATOM | 1173 | CA | PHE | 143 | 82.219 | 37.025 | −9.461 | 1.00 | 36.83 | | C |
| ATOM | 1174 | CB | PHE | 143 | 81.080 | 37.062 | −10.496 | 1.00 | 36.83 | | C |
| ATOM | 1175 | CG | PHE | 143 | 79.736 | 36.749 | −9.928 | 1.00 | 36.83 | | C |
| ATOM | 1176 | CD1 | PHE | 143 | 79.013 | 37.716 | −9.245 | 1.00 | 36.83 | | C |
| ATOM | 1177 | CD2 | PHE | 143 | 79.200 | 35.474 | −10.048 | 1.00 | 36.83 | | C |
| ATOM | 1178 | CE1 | PHE | 143 | 77.772 | 37.413 | −8.686 | 1.00 | 36.83 | | C |
| ATOM | 1179 | CE2 | PHE | 143 | 77.980 | 35.171 | −9.501 | 1.00 | 36.83 | | C |
| ATOM | 1180 | CZ | PHE | 143 | 77.262 | 36.140 | −8.817 | 1.00 | 36.83 | | C |
| ATOM | 1181 | C | PHE | 143 | 83.541 | 36.907 | −10.200 | 1.00 | 36.83 | | C |
| ATOM | 1182 | O | PHE | 143 | 83.835 | 35.861 | −10.785 | 1.00 | 36.83 | | O |
| ATOM | 1183 | N | LYS | 144 | 84.327 | 37.980 | −10.173 | 1.00 | 36.83 | | N |
| ATOM | 1184 | CA | LYS | 144 | 85.618 | 38.007 | −10.843 | 1.00 | 36.83 | | C |
| ATOM | 1185 | CB | LYS | 144 | 86.409 | 39.250 | −10.406 | 1.00 | 36.83 | | C |
| ATOM | 1186 | CG | LYS | 144 | 87.676 | 39.568 | −11.225 | 1.00 | 36.83 | | C |
| ATOM | 1187 | CD | LYS | 144 | 88.776 | 38.517 | −11.065 | 1.00 | 36.83 | | C |
| ATOM | 1188 | CE | LYS | 144 | 89.229 | 38.362 | −9.604 | 1.00 | 36.83 | | C |
| ATOM | 1189 | NZ | LYS | 144 | 90.136 | 37.186 | −9.386 | 1.00 | 36.83 | | N |
| ATOM | 1190 | C | LYS | 144 | 86.386 | 36.744 | −10.494 | 1.00 | 36.83 | | C |
| ATOM | 1191 | O | LYS | 144 | 86.645 | 36.463 | −9.323 | 1.00 | 36.83 | | O |
| ATOM | 1192 | N | GLY | 145 | 86.724 | 35.966 | −11.517 | 1.00 | 36.83 | | N |
| ATOM | 1193 | CA | GLY | 145 | 87.482 | 34.739 | −11.309 | 1.00 | 36.83 | | C |
| ATOM | 1194 | C | GLY | 145 | 86.935 | 33.632 | −10.424 | 1.00 | 36.83 | | C |
| ATOM | 1195 | O | GLY | 145 | 87.684 | 32.715 | −10.074 | 1.00 | 36.83 | | O |
| ATOM | 1196 | N | ARG | 146 | 85.659 | 33.678 | −10.055 | 1.00 | 36.83 | | N |
| ATOM | 1197 | CA | ARG | 146 | 85.098 | 32.620 | −9.207 | 1.00 | 36.83 | | C |
| ATOM | 1198 | CB | ARG | 146 | 83.874 | 33.128 | −8.441 | 1.00 | 36.83 | | C |
| ATOM | 1199 | CG | ARG | 146 | 84.149 | 34.018 | −7.236 | 1.00 | 36.83 | | C |
| ATOM | 1200 | CD | ARG | 146 | 85.027 | 33.318 | −6.200 | 1.00 | 36.83 | | C |
| ATOM | 1201 | NE | ARG | 146 | 86.410 | 33.766 | −6.318 | 1.00 | 36.83 | | N |
| ATOM | 1202 | CZ | ARG | 146 | 86.825 | 34.967 | −5.925 | 1.00 | 36.83 | | C |
| ATOM | 1203 | NH1 | ARG | 146 | 85.955 | 35.816 | −5.377 | 1.00 | 36.83 | | N |
| ATOM | 1204 | NH2 | ARG | 146 | 88.092 | 35.334 | −6.117 | 1.00 | 36.83 | | N |
| ATOM | 1205 | C | ARG | 146 | 84.689 | 31.397 | −10.038 | 1.00 | 36.83 | | C |
| ATOM | 1206 | O | ARG | 146 | 84.113 | 31.539 | −11.118 | 1.00 | 36.83 | | O |
| ATOM | 1207 | N | ARG | 147 | 84.984 | 30.193 | −9.548 | 1.00 | 36.83 | | N |
| ATOM | 1208 | CA | ARG | 147 | 84.598 | 28.986 | −10.279 | 1.00 | 36.83 | | C |
| ATOM | 1209 | CB | ARG | 147 | 85.231 | 27.735 | −9.656 | 1.00 | 36.83 | | C |
| ATOM | 1210 | CG | ARG | 147 | 86.762 | 27.717 | −9.583 | 1.00 | 36.83 | | C |
| ATOM | 1211 | CD | ARG | 147 | 87.417 | 27.646 | −10.951 | 1.00 | 36.83 | | C |
| ATOM | 1212 | NE | ARG | 147 | 86.764 | 26.668 | −11.816 | 1.00 | 36.83 | | N |
| ATOM | 1213 | CZ | ARG | 147 | 87.401 | 25.941 | −12.735 | 1.00 | 36.83 | | C |
| ATOM | 1214 | NH1 | ARG | 147 | 88.712 | 26.081 | −12.900 | 1.00 | 36.83 | | N |
| ATOM | 1215 | NH2 | ARG | 147 | 86.726 | 25.079 | −13.495 | 1.00 | 36.83 | | N |
| ATOM | 1216 | C | ARG | 147 | 83.071 | 28.869 | −10.181 | 1.00 | 36.83 | | C |
| ATOM | 1217 | O | ARG | 147 | 82.489 | 29.144 | −9.134 | 1.00 | 36.83 | | O |
| ATOM | 1218 | N | ARG | 148 | 82.425 | 28.442 | −11.259 | 1.00 | 36.83 | | N |
| ATOM | 1219 | CA | ARG | 148 | 80.972 | 28.319 | −11.261 | 1.00 | 36.83 | | C |
| ATOM | 1220 | CB | ARG | 148 | 80.507 | 27.517 | −12.473 | 1.00 | 36.83 | | C |
| ATOM | 1221 | CG | ARG | 148 | 79.456 | 28.212 | −13.310 | 1.00 | 36.83 | | C |
| ATOM | 1222 | CD | ARG | 148 | 78.823 | 27.214 | −14.259 | 1.00 | 36.83 | | C |
| ATOM | 1223 | NE | ARG | 148 | 78.097 | 26.180 | −13.522 | 1.00 | 36.83 | | N |
| ATOM | 1224 | CZ | ARG | 148 | 77.258 | 25.314 | −14.081 | 1.00 | 36.83 | | C |
| ATOM | 1225 | NH1 | ARG | 148 | 77.036 | 25.349 | −15.388 | 1.00 | 36.83 | | N |
| ATOM | 1226 | NH2 | ARG | 148 | 76.635 | 24.419 | −13.323 | 1.00 | 36.83 | | N |
| ATOM | 1227 | C | ARG | 148 | 80.369 | 27.700 | −10.001 | 1.00 | 36.83 | | C |
| ATOM | 1228 | O | ARG | 148 | 79.442 | 28.260 | −9.433 | 1.00 | 36.83 | | O |
| ATOM | 1229 | N | ASN | 149 | 80.876 | 26.553 | −9.553 | 1.00 | 36.83 | | N |
| ATOM | 1230 | CA | ASN | 149 | 80.302 | 25.926 | −8.357 | 1.00 | 36.83 | | C |
| ATOM | 1231 | CB | ASN | 149 | 80.532 | 24.401 | −8.360 | 1.00 | 36.83 | | C |
| ATOM | 1232 | CG | ASN | 149 | 81.960 | 24.000 | −8.012 | 1.00 | 36.83 | | C |
| ATOM | 1233 | OD1 | ASN | 149 | 82.417 | 24.193 | −6.885 | 1.00 | 36.83 | | O |
| ATOM | 1234 | ND2 | ASN | 149 | 82.665 | 23.423 | −8.979 | 1.00 | 36.83 | | N |
| ATOM | 1235 | C | ASN | 149 | 80.765 | 26.523 | −7.040 | 1.00 | 36.83 | | C |
| ATOM | 1236 | O | ASN | 149 | 80.580 | 25.910 | −5.987 | 1.00 | 36.83 | | O |
| ATOM | 1237 | N | GLU | 150 | 81.354 | 27.720 | −7.095 | 1.00 | 36.83 | | N |
| ATOM | 1238 | CA | GLU | 150 | 81.829 | 28.416 | −5.892 | 1.00 | 36.83 | | C |
| ATOM | 1239 | CB | GLU | 150 | 83.302 | 28.824 | −6.058 | 1.00 | 36.83 | | C |
| ATOM | 1240 | CG | GLU | 150 | 84.272 | 27.664 | −5.776 | 1.00 | 36.83 | | C |
| ATOM | 1241 | CD | GLU | 150 | 85.695 | 28.116 | −5.471 | 1.00 | 36.83 | | C |
| ATOM | 1242 | OE1 | GLU | 150 | 86.427 | 27.356 | −4.775 | 1.00 | 36.83 | | O |
| ATOM | 1243 | OE2 | GLU | 150 | 86.079 | 29.222 | −5.931 | 1.00 | 36.83 | | O |
| ATOM | 1244 | C | GLU | 150 | 80.962 | 29.643 | −5.537 | 1.00 | 36.83 | | C |
| ATOM | 1245 | O | GLU | 150 | 80.968 | 30.104 | −4.394 | 1.00 | 36.83 | | O |
| ATOM | 1246 | N | VAL | 151 | 80.229 | 30.168 | −6.519 | 1.00 | 36.83 | | N |
| ATOM | 1247 | CA | VAL | 151 | 79.324 | 31.303 | −6.304 | 1.00 | 36.83 | | C |
| ATOM | 1248 | CB | VAL | 151 | 79.788 | 32.570 | −7.055 | 1.00 | 36.83 | | C |
| ATOM | 1249 | CG1 | VAL | 151 | 81.086 | 33.064 | −6.479 | 1.00 | 36.83 | | C |
| ATOM | 1250 | CG2 | VAL | 151 | 79.942 | 32.268 | −8.539 | 1.00 | 36.83 | | C |
| ATOM | 1251 | C | VAL | 151 | 77.932 | 30.930 | −6.829 | 1.00 | 36.83 | | C |
| ATOM | 1252 | O | VAL | 151 | 77.773 | 29.920 | −7.513 | 1.00 | 36.83 | | O |
| ATOM | 1253 | N | ALA | 152 | 76.936 | 31.759 | −6.528 | 1.00 | 36.83 | | N |
| ATOM | 1254 | CA | ALA | 152 | 75.566 | 31.500 | −6.978 | 1.00 | 36.83 | | C |
| ATOM | 1255 | CB | ALA | 152 | 74.597 | 32.429 | −6.265 | 1.00 | 36.83 | | C |
| ATOM | 1256 | C | ALA | 152 | 75.409 | 31.669 | −8.481 | 1.00 | 36.83 | | C |
| ATOM | 1257 | O | ALA | 152 | 76.248 | 32.287 | −9.139 | 1.00 | 36.83 | | O |
| ATOM | 1258 | N | PRO | 153 | 74.326 | 31.112 | −9.047 | 1.00 | 36.83 | | N |
| ATOM | 1259 | CD | PRO | 153 | 73.388 | 30.157 | −8.427 | 1.00 | 36.83 | | C |
| ATOM | 1260 | CA | PRO | 153 | 74.078 | 31.229 | −10.484 | 1.00 | 36.83 | | C |
| ATOM | 1261 | CB | PRO | 153 | 72.802 | 30.414 | −10.682 | 1.00 | 36.83 | | C |
| ATOM | 1262 | CG | PRO | 153 | 72.915 | 29.351 | −9.620 | 1.00 | 36.83 | | C |
| ATOM | 1263 | C | PRO | 153 | 73.884 | 32.704 | −10.838 | 1.00 | 36.83 | | C |
| ATOM | 1264 | O | PRO | 153 | 73.189 | 33.434 | −10.125 | 1.00 | 36.83 | | O |
| ATOM | 1265 | N | HIS | 154 | 74.499 | 33.139 | −11.932 | 1.00 | 36.83 | | N |
| ATOM | 1266 | CA | HIS | 154 | 74.389 | 34.524 | −12.356 | 1.00 | 36.83 | | C |
| ATOM | 1267 | CB | HIS | 154 | 75.233 | 35.407 | −11.423 | 1.00 | 36.83 | | C |
| ATOM | 1268 | CG | HIS | 154 | 74.908 | 36.868 | −11.497 | 1.00 | 36.83 | | C |
| ATOM | 1269 | CD2 | HIS | 154 | 74.310 | 37.693 | −10.605 | 1.00 | 36.83 | | C |
| ATOM | 1270 | ND1 | HIS | 154 | 75.183 | 37.640 | −12.605 | 1.00 | 36.83 | | N |
| ATOM | 1271 | CE1 | HIS | 154 | 74.764 | 38.874 | −12.394 | 1.00 | 36.83 | | C |
| ATOM | 1272 | NE2 | HIS | 154 | 74.232 | 38.934 | −11.189 | 1.00 | 36.83 | | N |
| ATOM | 1273 | C | HIS | 154 | 74.882 | 34.650 | −13.797 | 1.00 | 36.83 | | C |
| ATOM | 1274 | O | HIS | 154 | 75.678 | 33.823 | −14.259 | 1.00 | 36.83 | | O |
| ATOM | 1275 | N | ILE | 155 | 74.400 | 35.667 | −14.510 | 1.00 | 36.83 | | N |
| ATOM | 1276 | CA | ILE | 155 | 74.838 | 35.889 | −15.880 | 1.00 | 36.83 | | C |
| ATOM | 1277 | CB | ILE | 155 | 73.975 | 36.971 | −16.614 | 1.00 | 36.83 | | C |
| ATOM | 1278 | CG2 | ILE | 155 | 74.039 | 38.280 | −15.882 | 1.00 | 36.83 | | C |
| ATOM | 1279 | CG1 | ILE | 155 | 74.473 | 37.181 | −18.054 | 1.00 | 36.83 | | C |
| ATOM | 1280 | CD1 | ILE | 155 | 74.409 | 35.935 | −18.942 | 1.00 | 36.83 | | C |
| ATOM | 1281 | C | ILE | 155 | 76.300 | 36.325 | −15.849 | 1.00 | 36.83 | | C |
| ATOM | 1282 | O | ILE | 155 | 76.981 | 36.265 | −16.863 | 1.00 | 36.83 | | O |
| ATOM | 1283 | N | PHE | 156 | 76.783 | 36.749 | −14.682 | 1.00 | 36.83 | | N |
| ATOM | 1284 | CA | PHE | 156 | 78.183 | 37.183 | −14.529 | 1.00 | 36.83 | | C |
| ATOM | 1285 | CB | PHE | 156 | 78.374 | 38.053 | −13.277 | 1.00 | 36.83 | | C |
| ATOM | 1286 | CG | PHE | 156 | 77.835 | 39.461 | −13.401 | 1.00 | 36.83 | | C |
| ATOM | 1287 | CD1 | PHE | 156 | 77.562 | 40.021 | −14.641 | 1.00 | 36.83 | | C |
| ATOM | 1288 | CD2 | PHE | 156 | 77.636 | 40.235 | −12.262 | 1.00 | 36.83 | | C |
| ATOM | 1289 | CE1 | PHE | 156 | 77.100 | 41.330 | −14.747 | 1.00 | 36.83 | | C |
| ATOM | 1290 | CE2 | PHE | 156 | 77.172 | 41.547 | −12.359 | 1.00 | 36.83 | | C |
| ATOM | 1291 | CZ | PHE | 156 | 76.903 | 42.095 | −13.606 | 1.00 | 36.83 | | C |
| ATOM | 1292 | C | PHE | 156 | 79.102 | 35.979 | −14.415 | 1.00 | 36.83 | | C |
| ATOM | 1293 | O | PHE | 156 | 80.221 | 35.996 | −14.915 | 1.00 | 36.83 | | O |
| ATOM | 1294 | N | ALA | 157 | 78.622 | 34.938 | −13.742 | 1.00 | 36.83 | | N |
| ATOM | 1295 | CA | ALA | 157 | 79.393 | 33.715 | −13.559 | 1.00 | 36.83 | | C |
| ATOM | 1296 | CB | ALA | 157 | 78.671 | 32.774 | −12.585 | 1.00 | 36.83 | | C |
| ATOM | 1297 | C | ALA | 157 | 79.626 | 33.015 | −14.887 | 1.00 | 36.83 | | C |
| ATOM | 1298 | O | ALA | 157 | 80.754 | 32.624 | −15.209 | 1.00 | 36.83 | | O |
| ATOM | 1299 | N | ILE | 158 | 78.553 | 32.858 | −15.654 | 1.00 | 36.83 | | N |
| ATOM | 1300 | CA | ILE | 158 | 78.619 | 32.204 | −16.950 | 1.00 | 36.83 | | C |
| ATOM | 1301 | CB | ILE | 158 | 77.200 | 32.054 | −17.569 | 1.00 | 36.83 | | C |
| ATOM | 1302 | CG2 | ILE | 158 | 76.636 | 33.416 | −17.933 | 1.00 | 36.83 | | C |
| ATOM | 1303 | CG1 | ILE | 158 | 77.258 | 31.191 | −18.822 | 1.00 | 36.83 | | C |
| ATOM | 1304 | CD1 | ILE | 158 | 77.554 | 29.717 | −18.539 | 1.00 | 36.83 | | C |
| ATOM | 1305 | C | ILE | 158 | 79.524 | 33.012 | −17.880 | 1.00 | 36.83 | | C |
| ATOM | 1306 | O | ILE | 158 | 80.157 | 32.455 | −18.789 | 1.00 | 36.83 | | O |
| ATOM | 1307 | N | SER | 159 | 79.588 | 34.324 | −17.662 | 1.00 | 36.83 | | N |
| ATOM | 1308 | CA | SER | 159 | 80.452 | 35.166 | −18.480 | 1.00 | 36.83 | | C |
| ATOM | 1309 | CB | SER | 159 | 80.175 | 36.650 | −18.235 | 1.00 | 36.83 | | C |
| ATOM | 1310 | OG | SER | 159 | 78.873 | 37.024 | −18.635 | 1.00 | 36.83 | | O |
| ATOM | 1311 | C | SER | 159 | 81.908 | 34.886 | −18.111 | 1.00 | 36.83 | | C |
| ATOM | 1312 | O | SER | 159 | 82.763 | 34.706 | −18.977 | 1.00 | 36.83 | | O |
| ATOM | 1313 | N | ASP | 160 | 82.167 | 34.848 | −16.808 | 1.00 | 36.83 | | N |
| ATOM | 1314 | CA | ASP | 160 | 83.503 | 34.617 | −16.272 | 1.00 | 36.83 | | C |
| ATOM | 1315 | CB | ASP | 160 | 83.452 | 34.672 | −14.734 | 1.00 | 36.83 | | C |
| ATOM | 1316 | CG | ASP | 160 | 84.828 | 34.671 | −14.100 | 1.00 | 36.83 | | C |
| ATOM | 1317 | OD1 | ASP | 160 | 85.327 | 33.566 | −13.773 | 1.00 | 36.83 | | O |
| ATOM | 1318 | OD2 | ASP | 160 | 85.415 | 35.776 | −13.942 | 1.00 | 36.83 | | O |
| ATOM | 1319 | C | ASP | 160 | 84.060 | 33.285 | −16.758 | 1.00 | 36.83 | | C |
| ATOM | 1320 | O | ASP | 160 | 85.228 | 33.196 | −17.147 | 1.00 | 36.83 | | O |
| ATOM | 1321 | N | VAL | 161 | 83.216 | 32.257 | −16.753 | 1.00 | 36.83 | | N |
| ATOM | 1322 | CA | VAL | 161 | 83.631 | 30.942 | −17.209 | 1.00 | 36.83 | | C |
| ATOM | 1323 | CB | VAL | 161 | 82.528 | 29.889 | −16.998 | 1.00 | 36.83 | | C |
| ATOM | 1324 | CG1 | VAL | 161 | 83.046 | 28.534 | −17.386 | 1.00 | 36.83 | | C |
| ATOM | 1325 | CG2 | VAL | 161 | 82.077 | 29.874 | −15.553 | 1.00 | 36.83 | | C |
| ATOM | 1326 | C | VAL | 161 | 83.992 | 30.980 | −18.699 | 1.00 | 36.83 | | C |
| ATOM | 1327 | O | VAL | 161 | 84.959 | 30.344 | −19.129 | 1.00 | 36.83 | | O |
| ATOM | 1328 | N | ALA | 162 | 83.221 | 31.718 | −19.492 | 1.00 | 36.83 | | N |
| ATOM | 1329 | CA | ALA | 162 | 83.527 | 31.793 | −20.909 | 1.00 | 36.83 | | C |
| ATOM | 1330 | CB | ALA | 162 | 82.396 | 32.461 | −21.668 | 1.00 | 36.83 | | C |
| ATOM | 1331 | C | ALA | 162 | 84.824 | 32.582 | −21.094 | 1.00 | 36.83 | | C |
| ATOM | 1332 | O | ALA | 162 | 85.556 | 32.381 | −22.064 | 1.00 | 36.83 | | O |
| ATOM | 1333 | N | TYR | 163 | 85.105 | 33.477 | −20.151 | 1.00 | 36.83 | | N |
| ATOM | 1334 | CA | TYR | 163 | 86.306 | 34.284 | −20.241 | 1.00 | 36.83 | | C |
| ATOM | 1335 | CB | TYR | 163 | 86.218 | 35.467 | −19.282 | 1.00 | 36.83 | | C |
| ATOM | 1336 | CG | TYR | 163 | 87.451 | 36.357 | −19.280 | 1.00 | 36.83 | | C |
| ATOM | 1337 | CD1 | TYR | 163 | 87.802 | 37.115 | −20.402 | 1.00 | 36.83 | | C |
| ATOM | 1338 | CE1 | TYR | 163 | 88.900 | 37.965 | −20.374 | 1.00 | 36.83 | | C |
| ATOM | 1339 | CD2 | TYR | 163 | 88.239 | 36.472 | −18.140 | 1.00 | 36.83 | | C |
| ATOM | 1340 | CE2 | TYR | 163 | 89.330 | 37.310 | −18.103 | 1.00 | 36.83 | | C |
| ATOM | 1341 | CZ | TYR | 163 | 89.654 | 38.058 | −19.214 | 1.00 | 36.83 | | C |
| ATOM | 1342 | OH | TYR | 163 | 90.704 | 38.941 | −19.127 | 1.00 | 36.83 | | O |
| ATOM | 1343 | C | TYR | 163 | 87.549 | 33.463 | −19.934 | 1.00 | 36.83 | | C |
| ATOM | 1344 | O | TYR | 163 | 88.537 | 33.530 | −20.661 | 1.00 | 36.83 | | O |
| ATOM | 1345 | N | ARG | 164 | 87.490 | 32.691 | −18.857 | 1.00 | 36.83 | | N |
| ATOM | 1346 | CA | ARG | 164 | 88.621 | 31.870 | −18.446 | 1.00 | 36.83 | | C |
| ATOM | 1347 | CB | ARG | 164 | 88.302 | 31.114 | −17.143 | 1.00 | 36.83 | | C |
| ATOM | 1348 | CG | ARG | 164 | 87.826 | 32.006 | −16.013 | 1.00 | 36.83 | | C |
| ATOM | 1349 | CD | ARG | 164 | 88.872 | 33.044 | −15.632 | 1.00 | 36.83 | | C |
| ATOM | 1350 | NE | ARG | 164 | 88.254 | 34.333 | −15.326 | 1.00 | 36.83 | | N |
| ATOM | 1351 | CZ | ARG | 164 | 88.869 | 35.330 | −14.703 | 1.00 | 36.83 | | C |
| ATOM | 1352 | NH1 | ARG | 164 | 90.128 | 35.186 | −14.310 | 1.00 | 36.83 | | N |
| ATOM | 1353 | NH2 | ARG | 164 | 88.233 | 36.469 | −14.475 | 1.00 | 36.83 | | N |
| ATOM | 1354 | C | ARG | 164 | 88.985 | 30.875 | −19.535 | 1.00 | 36.83 | | C |
| ATOM | 1355 | O | ARG | 164 | 90.156 | 30.718 | −19.887 | 1.00 | 36.83 | | O |
| ATOM | 1356 | N | SER | 165 | 87.966 | 30.214 | −20.070 | 1.00 | 36.83 | | N |
| ATOM | 1357 | CA | SER | 165 | 88.152 | 29.212 | −21.112 | 1.00 | 36.83 | | C |
| ATOM | 1358 | CB | SER | 165 | 86.803 | 28.646 | −21.506 | 1.00 | 36.83 | | C |
| ATOM | 1359 | OG | SER | 165 | 86.173 | 28.115 | −20.361 | 1.00 | 36.83 | | O |
| ATOM | 1360 | C | SER | 165 | 88.856 | 29.787 | −22.329 | 1.00 | 36.83 | | C |
| ATOM | 1361 | O | SER | 165 | 89.656 | 29.105 | −22.974 | 1.00 | 36.83 | | O |
| ATOM | 1362 | N | MET | 166 | 88.534 | 31.033 | −22.658 | 1.00 | 36.83 | | N |
| ATOM | 1363 | CA | MET | 166 | 89.182 | 31.696 | −23.766 | 1.00 | 36.83 | | C |
| ATOM | 1364 | CB | MET | 166 | 88.624 | 33.103 | −23.966 | 1.00 | 36.83 | | C |
| ATOM | 1365 | CG | MET | 166 | 89.276 | 33.826 | −25.118 | 1.00 | 36.83 | | C |
| ATOM | 1366 | SD | MET | 166 | 88.821 | 35.556 | −25.224 | 1.00 | 36.83 | | S |
| ATOM | 1367 | CE | MET | 166 | 89.782 | 36.201 | −23.901 | 1.00 | 36.83 | | C |
| ATOM | 1368 | C | MET | 166 | 90.664 | 31.800 | −23.414 | 1.00 | 36.83 | | C |
| ATOM | 1369 | O | MET | 166 | 91.535 | 31.516 | −24.241 | 1.00 | 36.83 | | O |
| ATOM | 1370 | N | LEU | 167 | 90.947 | 32.182 | −22.170 | 1.00 | 36.83 | | N |
| ATOM | 1371 | CA | LEU | 167 | 92.331 | 32.341 | −21.724 | 1.00 | 36.83 | | C |
| ATOM | 1372 | CB | LEU | 167 | 92.410 | 33.292 | −20.519 | 1.00 | 36.83 | | C |
| ATOM | 1373 | CG | LEU | 167 | 91.878 | 34.714 | −20.688 | 1.00 | 36.83 | | C |
| ATOM | 1374 | CD1 | LEU | 167 | 92.288 | 35.569 | −19.504 | 1.00 | 36.83 | | C |
| ATOM | 1375 | CD2 | LEU | 167 | 92.425 | 35.305 | −21.963 | 1.00 | 36.83 | | C |
| ATOM | 1376 | C | LEU | 167 | 93.038 | 31.049 | −21.364 | 1.00 | 36.83 | | C |
| ATOM | 1377 | O | LEU | 167 | 94.269 | 31.000 | −21.371 | 1.00 | 36.83 | | O |
| ATOM | 1378 | N | ASP | 168 | 92.284 | 30.000 | −21.054 | 1.00 | 36.83 | | N |
| ATOM | 1379 | CA | ASP | 168 | 92.902 | 28.732 | −20.665 | 1.00 | 36.83 | | C |
| ATOM | 1380 | CB | ASP | 168 | 92.141 | 28.126 | −19.472 | 1.00 | 36.83 | | C |
| ATOM | 1381 | CG | ASP | 168 | 92.255 | 28.984 | −18.219 | 1.00 | 36.83 | | C |
| ATOM | 1382 | OD1 | ASP | 168 | 93.135 | 29.874 | −18.208 | 1.00 | 36.83 | | O |
| ATOM | 1383 | OD2 | ASP | 168 | 91.487 | 28.783 | −17.243 | 1.00 | 36.83 | | O |
| ATOM | 1384 | C | ASP | 168 | 93.009 | 27.721 | −21.806 | 1.00 | 36.83 | | C |
| ATOM | 1385 | O | ASP | 168 | 93.858 | 26.820 | −21.784 | 1.00 | 36.83 | | O |
| ATOM | 1386 | N | ASP | 169 | 92.159 | 27.864 | −22.811 | 1.00 | 36.83 | | N |
| ATOM | 1387 | CA | ASP | 169 | 92.196 | 26.948 | −23.934 | 1.00 | 36.83 | | C |
| ATOM | 1388 | CB | ASP | 169 | 90.809 | 26.352 | −24.184 | 1.00 | 36.83 | | C |
| ATOM | 1389 | CG | ASP | 169 | 90.315 | 25.511 | −23.016 | 1.00 | 36.83 | | C |
| ATOM | 1390 | OD1 | ASP | 169 | 91.156 | 24.924 | −22.313 | 1.00 | 36.83 | | O |
| ATOM | 1391 | OD2 | ASP | 169 | 89.082 | 25.422 | −22.814 | 1.00 | 36.83 | | O |
| ATOM | 1392 | C | ASP | 169 | 92.684 | 27.648 | −25.187 | 1.00 | 36.83 | | C |
| ATOM | 1393 | O | ASP | 169 | 93.007 | 27.002 | −26.180 | 1.00 | 36.83 | | O |
| ATOM | 1394 | N | ARG | 170 | 92.743 | 28.974 | −25.135 | 1.00 | 36.83 | | N |
| ATOM | 1395 | CA | ARG | 170 | 93.173 | 29.761 | −26.287 | 1.00 | 36.83 | | C |
| ATOM | 1396 | CB | ARG | 170 | 94.535 | 29.269 | −26.781 | 1.00 | 36.83 | | C |
| ATOM | 1397 | CG | ARG | 170 | 95.664 | 29.357 | −25.751 | 1.00 | 36.83 | | C |
| ATOM | 1398 | CD | ARG | 170 | 96.117 | 30.797 | −25.555 | 1.00 | 36.83 | | C |
| ATOM | 1399 | NE | ARG | 170 | 97.452 | 30.879 | −24.958 | 1.00 | 36.83 | | N |
| ATOM | 1400 | CZ | ARG | 170 | 97.770 | 30.451 | −23.732 | 1.00 | 36.83 | | C |
| ATOM | 1401 | NH1 | ARG | 170 | 96.855 | 29.898 | −22.935 | 1.00 | 36.83 | | N |
| ATOM | 1402 | NH2 | ARG | 170 | 99.015 | 30.565 | −23.302 | 1.00 | 36.83 | | N |
| ATOM | 1403 | C | ARG | 170 | 92.145 | 29.647 | −27.420 | 1.00 | 36.83 | | C |
| ATOM | 1404 | O | ARG | 170 | 92.447 | 29.966 | −28.570 | 1.00 | 36.83 | | O |
| ATOM | 1405 | N | GLN | 171 | 90.931 | 29.206 | −27.081 | 1.00 | 36.83 | | N |
| ATOM | 1406 | CA | GLN | 171 | 89.850 | 29.021 | −28.053 | 1.00 | 36.83 | | C |
| ATOM | 1407 | CB | GLN | 171 | 89.250 | 27.616 | −27.883 | 1.00 | 36.83 | | C |
| ATOM | 1408 | CG | GLN | 171 | 88.210 | 27.243 | −28.921 | 1.00 | 36.83 | | C |
| ATOM | 1409 | CD | GLN | 171 | 87.917 | 25.743 | −28.968 | 1.00 | 36.83 | | C |
| ATOM | 1410 | OE1 | GLN | 171 | 88.831 | 24.919 | −29.152 | 1.00 | 36.83 | | O |
| ATOM | 1411 | NE2 | GLN | 171 | 86.635 | 25.379 | −28.821 | 1.00 | 36.83 | | N |
| ATOM | 1412 | C | GLN | 171 | 88.744 | 30.076 | −27.923 | 1.00 | 36.83 | | C |
| ATOM | 1413 | O | GLN | 171 | 88.335 | 30.428 | −26.808 | 1.00 | 36.83 | | O |
| ATOM | 1414 | N | ASN | 172 | 88.270 | 30.573 | −29.067 | 1.00 | 36.83 | | N |
| ATOM | 1415 | CA | ASN | 172 | 87.204 | 31.579 | −29.112 | 1.00 | 36.83 | | C |
| ATOM | 1416 | CB | ASN | 172 | 86.895 | 31.955 | −30.569 | 1.00 | 36.83 | | C |
| ATOM | 1417 | CG | ASN | 172 | 87.976 | 32.810 | −31.199 | 1.00 | 36.83 | | C |
| ATOM | 1418 | OD1 | ASN | 172 | 88.493 | 32.485 | −32.274 | 1.00 | 36.83 | | O |
| ATOM | 1419 | ND2 | ASN | 172 | 88.312 | 33.925 | −30.546 | 1.00 | 36.83 | | N |
| ATOM | 1420 | C | ASN | 172 | 85.925 | 31.043 | −28.454 | 1.00 | 36.83 | | C |
| ATOM | 1421 | O | ASN | 172 | 85.633 | 29.854 | −28.514 | 1.00 | 36.83 | | O |
| ATOM | 1422 | N | GLN | 173 | 85.150 | 31.926 | −27.844 | 1.00 | 36.83 | | N |
| ATOM | 1423 | CA | GLN | 173 | 83.927 | 31.496 | −27.166 | 1.00 | 36.83 | | C |
| ATOM | 1424 | CB | GLN | 173 | 84.082 | 31.687 | −25.648 | 1.00 | 36.83 | | C |
| ATOM | 1425 | CG | GLN | 173 | 85.373 | 31.152 | −25.039 | 1.00 | 36.83 | | C |
| ATOM | 1426 | CD | GLN | 173 | 85.373 | 29.649 | −24.861 | 1.00 | 36.83 | | C |
| ATOM | 1427 | OE1 | GLN | 173 | 84.398 | 29.068 | −24.395 | 1.00 | 36.83 | | O |
| ATOM | 1428 | NE2 | GLN | 173 | 86.490 | 29.008 | −25.217 | 1.00 | 36.83 | | N |
| ATOM | 1429 | C | GLN | 173 | 82.695 | 32.269 | −27.640 | 1.00 | 36.83 | | C |
| ATOM | 1430 | O | GLN | 173 | 82.807 | 33.290 | −28.332 | 1.00 | 36.83 | | O |
| ATOM | 1431 | N | SER | 174 | 81.518 | 31.780 | −27.257 | 1.00 | 36.83 | | N |
| ATOM | 1432 | CA | SER | 174 | 80.265 | 32.448 | −27.626 | 1.00 | 36.83 | | C |
| ATOM | 1433 | CB | SER | 174 | 79.763 | 31.961 | −28.988 | 1.00 | 36.83 | | C |
| ATOM | 1434 | OG | SER | 174 | 79.309 | 30.621 | −28.909 | 1.00 | 36.83 | | O |
| ATOM | 1435 | C | SER | 174 | 79.150 | 32.244 | −26.608 | 1.00 | 36.83 | | C |
| ATOM | 1436 | O | SER | 174 | 78.958 | 31.142 | −26.074 | 1.00 | 36.83 | | O |
| ATOM | 1437 | N | LEU | 175 | 78.426 | 33.320 | −26.332 | 1.00 | 36.83 | | N |
| ATOM | 1438 | CA | LEU | 175 | 77.297 | 33.256 | −25.421 | 1.00 | 36.83 | | C |
| ATOM | 1439 | CB | LEU | 175 | 77.360 | 34.381 | −24.387 | 1.00 | 36.83 | | C |
| ATOM | 1440 | CG | LEU | 175 | 78.220 | 34.033 | −23.172 | 1.00 | 36.83 | | C |
| ATOM | 1441 | CD1 | LEU | 175 | 79.641 | 33.760 | −23.606 | 1.00 | 36.83 | | C |
| ATOM | 1442 | CD2 | LEU | 175 | 78.182 | 35.157 | −22.178 | 1.00 | 36.83 | | C |
| ATOM | 1443 | C | LEU | 175 | 76.013 | 33.347 | −26.235 | 1.00 | 36.83 | | C |
| ATOM | 1444 | O | LEU | 175 | 75.655 | 34.395 | −26.756 | 1.00 | 36.83 | | O |
| ATOM | 1445 | N | LEU | 176 | 75.341 | 32.217 | −26.357 | 1.00 | 36.83 | | N |
| ATOM | 1446 | CA | LEU | 176 | 74.097 | 32.144 | −27.093 | 1.00 | 36.83 | | C |
| ATOM | 1447 | CB | LEU | 176 | 74.043 | 30.814 | −27.844 | 1.00 | 36.83 | | C |
| ATOM | 1448 | CG | LEU | 176 | 75.332 | 30.575 | −28.639 | 1.00 | 36.83 | | C |
| ATOM | 1449 | CD1 | LEU | 176 | 75.256 | 29.264 | −29.348 | 1.00 | 36.83 | | C |
| ATOM | 1450 | CD2 | LEU | 176 | 75.558 | 31.690 | −29.637 | 1.00 | 36.83 | | C |
| ATOM | 1451 | C | LEU | 176 | 72.929 | 32.271 | −26.114 | 1.00 | 36.83 | | C |
| ATOM | 1452 | O | LEU | 176 | 72.702 | 31.398 | −25.281 | 1.00 | 36.83 | | O |
| ATOM | 1453 | N | ILE | 177 | 72.188 | 33.365 | −26.217 | 1.00 | 36.83 | | N |
| ATOM | 1454 | CA | ILE | 177 | 71.060 | 33.578 | −25.321 | 1.00 | 36.83 | | C |
| ATOM | 1455 | CB | ILE | 177 | 71.144 | 34.970 | −24.644 | 1.00 | 36.83 | | C |
| ATOM | 1456 | CG2 | ILE | 177 | 70.106 | 35.063 | −23.517 | 1.00 | 36.83 | | C |
| ATOM | 1457 | CG1 | ILE | 177 | 72.566 | 35.180 | −24.102 | 1.00 | 36.83 | | C |
| ATOM | 1458 | CD1 | ILE | 177 | 72.797 | 36.512 | −23.477 | 1.00 | 36.83 | | C |
| ATOM | 1459 | C | ILE | 177 | 69.737 | 33.437 | −26.065 | 1.00 | 36.83 | | C |
| ATOM | 1460 | O | ILE | 177 | 69.342 | 34.308 | −26.832 | 1.00 | 36.83 | | O |
| ATOM | 1461 | N | THR | 178 | 69.063 | 32.322 | −25.824 | 1.00 | 36.83 | | N |
| ATOM | 1462 | CA | THR | 178 | 67.795 | 32.039 | −26.473 | 1.00 | 36.83 | | C |
| ATOM | 1463 | CB | THR | 178 | 67.622 | 30.511 | −26.693 | 1.00 | 36.83 | | C |
| ATOM | 1464 | OG1 | THR | 178 | 67.320 | 29.876 | −25.449 | 1.00 | 36.83 | | O |
| ATOM | 1465 | CG2 | THR | 178 | 68.899 | 29.912 | −27.245 | 1.00 | 36.83 | | C |
| ATOM | 1466 | C | THR | 178 | 66.577 | 32.558 | −25.699 | 1.00 | 36.83 | | C |
| ATOM | 1467 | O | THR | 178 | 66.674 | 32.950 | −24.539 | 1.00 | 36.83 | | O |
| ATOM | 1468 | N | GLY | 179 | 65.428 | 32.554 | −26.362 | 1.00 | 36.83 | | N |
| ATOM | 1469 | CA | GLY | 179 | 64.203 | 32.990 | −25.720 | 1.00 | 36.83 | | C |
| ATOM | 1470 | C | GLY | 179 | 63.164 | 33.561 | −26.663 | 1.00 | 36.83 | | C |
| ATOM | 1471 | O | GLY | 179 | 63.504 | 34.175 | −27.666 | 1.00 | 36.83 | | O |
| ATOM | 1472 | N | GLU | 180 | 61.890 | 33.338 | −26.354 | 1.00 | 36.83 | | N |
| ATOM | 1473 | CA | GLU | 180 | 60.826 | 33.883 | −27.171 | 1.00 | 36.83 | | C |
| ATOM | 1474 | CB | GLU | 180 | 59.471 | 33.258 | −26.804 | 1.00 | 36.83 | | C |
| ATOM | 1475 | CG | GLU | 180 | 58.841 | 33.659 | −25.464 | 1.00 | 36.83 | | C |
| ATOM | 1476 | CD | GLU | 180 | 57.466 | 32.999 | −25.257 | 1.00 | 36.83 | | C |
| ATOM | 1477 | OE1 | GLU | 180 | 57.423 | 31.810 | −24.901 | 1.00 | 36.83 | | O |
| ATOM | 1478 | OE2 | GLU | 180 | 56.426 | 33.662 | −25.467 | 1.00 | 36.83 | | O |
| ATOM | 1479 | C | GLU | 180 | 60.843 | 35.384 | −26.901 | 1.00 | 36.83 | | C |
| ATOM | 1480 | O | GLU | 180 | 61.547 | 35.844 | −25.998 | 1.00 | 36.83 | | O |
| ATOM | 1481 | N | SER | 181 | 60.087 | 36.153 | −27.676 | 1.00 | 36.83 | | N |
| ATOM | 1482 | CA | SER | 181 | 60.079 | 37.601 | −27.495 | 1.00 | 36.83 | | C |
| ATOM | 1483 | CB | SER | 181 | 59.089 | 38.261 | −28.459 | 1.00 | 36.83 | | C |
| ATOM | 1484 | OG | SER | 181 | 59.048 | 39.658 | −28.239 | 1.00 | 36.83 | | O |
| ATOM | 1485 | C | SER | 181 | 59.767 | 38.026 | −26.069 | 1.00 | 36.83 | | C |
| ATOM | 1486 | O | SER | 181 | 58.839 | 37.522 | −25.455 | 1.00 | 36.83 | | O |
| ATOM | 1487 | N | GLY | 182 | 60.569 | 38.946 | −25.545 | 1.00 | 36.83 | | N |
| ATOM | 1488 | CA | GLY | 182 | 60.361 | 39.442 | −24.192 | 1.00 | 36.83 | | C |
| ATOM | 1489 | C | GLY | 182 | 60.878 | 38.588 | −23.041 | 1.00 | 36.83 | | C |
| ATOM | 1490 | O | GLY | 182 | 60.670 | 38.926 | −21.873 | 1.00 | 36.83 | | O |
| ATOM | 1491 | N | ALA | 183 | 61.553 | 37.486 | −23.357 | 1.00 | 36.83 | | N |
| ATOM | 1492 | CA | ALA | 183 | 62.080 | 36.599 | −22.325 | 1.00 | 36.83 | | C |
| ATOM | 1493 | CB | ALA | 183 | 62.459 | 35.246 | −22.944 | 1.00 | 36.83 | | C |
| ATOM | 1494 | C | ALA | 183 | 63.267 | 37.177 | −21.517 | 1.00 | 36.83 | | C |
| ATOM | 1495 | O | ALA | 183 | 63.530 | 36.733 | −20.405 | 1.00 | 36.83 | | O |
| ATOM | 1496 | N | GLY | 184 | 63.974 | 38.161 | −22.065 | 1.00 | 36.83 | | N |
| ATOM | 1497 | CA | GLY | 184 | 65.084 | 38.761 | −21.338 | 1.00 | 36.83 | | C |
| ATOM | 1498 | C | GLY | 184 | 66.447 | 38.686 | −22.000 | 1.00 | 36.83 | | C |
| ATOM | 1499 | O | GLY | 184 | 67.454 | 39.019 | −21.381 | 1.00 | 36.83 | | O |
| ATOM | 1500 | N | LYS | 185 | 66.476 | 38.265 | −23.258 | 1.00 | 36.83 | | N |
| ATOM | 1501 | CA | LYS | 185 | 67.712 | 38.132 | −24.022 | 1.00 | 36.83 | | C |
| ATOM | 1502 | CB | LYS | 185 | 67.406 | 37.678 | −25.451 | 1.00 | 36.83 | | C |
| ATOM | 1503 | CG | LYS | 185 | 66.817 | 36.291 | −25.579 | 1.00 | 36.83 | | C |
| ATOM | 1504 | CD | LYS | 185 | 66.463 | 36.034 | −27.020 | 1.00 | 36.83 | | C |
| ATOM | 1505 | CE | LYS | 185 | 65.455 | 37.053 | −27.545 | 1.00 | 36.83 | | C |
| ATOM | 1506 | NZ | LYS | 185 | 64.057 | 36.832 | −27.060 | 1.00 | 36.83 | | N |
| ATOM | 1507 | C | LYS | 185 | 68.553 | 39.399 | −24.099 | 1.00 | 36.83 | | C |
| ATOM | 1508 | O | LYS | 185 | 69.756 | 39.375 | −23.835 | 1.00 | 36.83 | | O |
| ATOM | 1509 | N | THR | 186 | 67.927 | 40.501 | −24.485 | 1.00 | 36.83 | | N |
| ATOM | 1510 | CA | THR | 186 | 68.655 | 41.746 | −24.605 | 1.00 | 36.83 | | C |
| ATOM | 1511 | CB | THR | 186 | 67.778 | 42.834 | −25.290 | 1.00 | 36.83 | | C |
| ATOM | 1512 | OG1 | THR | 186 | 67.524 | 42.449 | −26.645 | 1.00 | 36.83 | | O |
| ATOM | 1513 | CG2 | THR | 186 | 68.481 | 44.179 | −25.302 | 1.00 | 36.83 | | C |
| ATOM | 1514 | C | THR | 186 | 69.202 | 42.244 | −23.260 | 1.00 | 36.83 | | C |
| ATOM | 1515 | O | THR | 186 | 70.359 | 42.652 | −23.193 | 1.00 | 36.83 | | O |
| ATOM | 1516 | N | GLU | 187 | 68.399 | 42.196 | −22.195 | 1.00 | 36.83 | | N |
| ATOM | 1517 | CA | GLU | 187 | 68.854 | 42.657 | −20.880 | 1.00 | 36.83 | | C |
| ATOM | 1518 | CB | GLU | 187 | 67.726 | 42.588 | −19.844 | 1.00 | 36.83 | | C |
| ATOM | 1519 | CG | GLU | 187 | 66.566 | 43.513 | −20.135 | 1.00 | 36.83 | | C |
| ATOM | 1520 | CD | GLU | 187 | 67.021 | 44.940 | −20.332 | 1.00 | 36.83 | | C |
| ATOM | 1521 | OE1 | GLU | 187 | 66.522 | 45.605 | −21.263 | 1.00 | 36.83 | | O |
| ATOM | 1522 | OE2 | GLU | 187 | 67.882 | 45.398 | −19.554 | 1.00 | 36.83 | | O |
| ATOM | 1523 | C | GLU | 187 | 70.042 | 41.845 | −20.386 | 1.00 | 36.83 | | C |
| ATOM | 1524 | O | GLU | 187 | 70.953 | 42.386 | −19.739 | 1.00 | 36.83 | | O |
| ATOM | 1525 | N | ASN | 188 | 70.026 | 40.548 | −20.680 | 1.00 | 36.83 | | N |
| ATOM | 1526 | CA | ASN | 188 | 71.113 | 39.677 | −20.283 | 1.00 | 36.83 | | C |
| ATOM | 1527 | CB | ASN | 188 | 70.664 | 38.219 | −20.314 | 1.00 | 36.83 | | C |
| ATOM | 1528 | CG | ASN | 188 | 69.978 | 37.801 | −19.024 | 1.00 | 36.83 | | C |
| ATOM | 1529 | OD1 | ASN | 188 | 70.631 | 37.586 | −18.003 | 1.00 | 36.83 | | O |
| ATOM | 1530 | ND2 | ASN | 188 | 68.655 | 37.705 | −19.058 | 1.00 | 36.83 | | N |
| ATOM | 1531 | C | ASN | 188 | 72.354 | 39.894 | −21.145 | 1.00 | 36.83 | | C |
| ATOM | 1532 | O | ASN | 188 | 73.461 | 39.716 | −20.670 | 1.00 | 36.83 | | O |
| ATOM | 1533 | N | THR | 189 | 72.166 | 40.289 | −22.404 | 1.00 | 36.83 | | N |
| ATOM | 1534 | CA | THR | 189 | 73.288 | 40.564 | −23.290 | 1.00 | 36.83 | | C |
| ATOM | 1535 | CB | THR | 189 | 72.837 | 40.846 | −24.763 | 1.00 | 36.83 | | C |
| ATOM | 1536 | OG1 | THR | 189 | 72.205 | 39.684 | −25.324 | 1.00 | 36.83 | | O |
| ATOM | 1537 | CG2 | THR | 189 | 74.039 | 41.194 | −25.626 | 1.00 | 36.83 | | C |
| ATOM | 1538 | C | THR | 189 | 73.999 | 41.804 | −22.738 | 1.00 | 36.83 | | C |
| ATOM | 1539 | O | THR | 189 | 75.226 | 41.827 | −22.654 | 1.00 | 36.83 | | O |
| ATOM | 1540 | N | LYS | 190 | 73.229 | 42.822 | −22.345 | 1.00 | 36.83 | | N |
| ATOM | 1541 | CA | LYS | 190 | 73.810 | 44.051 | −21.790 | 1.00 | 36.83 | | C |
| ATOM | 1542 | CB | LYS | 190 | 72.739 | 45.071 | −21.393 | 1.00 | 36.83 | | C |
| ATOM | 1543 | CG | LYS | 190 | 71.964 | 45.699 | −22.520 | 1.00 | 36.83 | | C |
| ATOM | 1544 | CD | LYS | 190 | 70.835 | 46.576 | −21.949 | 1.00 | 36.83 | | C |
| ATOM | 1545 | CE | LYS | 190 | 69.921 | 47.128 | −23.038 | 1.00 | 36.83 | | C |
| ATOM | 1546 | NZ | LYS | 190 | 68.785 | 47.886 | −22.446 | 1.00 | 36.83 | | N |
| ATOM | 1547 | C | LYS | 190 | 74.657 | 43.772 | −20.548 | 1.00 | 36.83 | | C |
| ATOM | 1548 | O | LYS | 190 | 75.640 | 44.479 | −20.300 | 1.00 | 36.83 | | O |
| ATOM | 1549 | N | LYS | 191 | 74.272 | 42.770 | −19.760 | 1.00 | 36.83 | | N |
| ATOM | 1550 | CA | LYS | 191 | 75.025 | 42.444 | −18.567 | 1.00 | 36.83 | | C |
| ATOM | 1551 | CB | LYS | 191 | 74.189 | 41.599 | −17.600 | 1.00 | 36.83 | | C |
| ATOM | 1552 | CG | LYS | 191 | 72.868 | 42.247 | −17.185 | 1.00 | 36.83 | | C |
| ATOM | 1553 | CD | LYS | 191 | 73.042 | 43.714 | −16.793 | 1.00 | 36.83 | | C |
| ATOM | 1554 | CE | LYS | 191 | 71.704 | 44.445 | −16.770 | 1.00 | 36.83 | | C |
| ATOM | 1555 | NZ | LYS | 191 | 71.059 | 44.473 | −18.128 | 1.00 | 36.83 | | N |
| ATOM | 1556 | C | LYS | 191 | 76.314 | 41.714 | −18.925 | 1.00 | 36.83 | | C |
| ATOM | 1557 | O | LYS | 191 | 77.346 | 41.923 | −18.280 | 1.00 | 36.83 | | O |
| ATOM | 1558 | N | VAL | 192 | 76.262 | 40.849 | −19.937 | 1.00 | 36.83 | | N |
| ATOM | 1559 | CA | VAL | 192 | 77.469 | 40.142 | −20.345 | 1.00 | 36.83 | | C |
| ATOM | 1560 | CB | VAL | 192 | 77.223 | 39.142 | −21.500 | 1.00 | 36.83 | | C |
| ATOM | 1561 | CG1 | VAL | 192 | 78.565 | 38.645 | −22.037 | 1.00 | 36.83 | | C |
| ATOM | 1562 | CG2 | VAL | 192 | 76.404 | 37.960 | −21.007 | 1.00 | 36.83 | | C |
| ATOM | 1563 | C | VAL | 192 | 78.484 | 41.184 | −20.809 | 1.00 | 36.83 | | C |
| ATOM | 1564 | O | VAL | 192 | 79.611 | 41.185 | −20.342 | 1.00 | 36.83 | | O |
| ATOM | 1565 | N | ILE | 193 | 78.083 | 42.072 | −21.718 | 1.00 | 36.83 | | N |
| ATOM | 1566 | CA | ILE | 193 | 78.997 | 43.108 | −22.188 | 1.00 | 36.83 | | C |
| ATOM | 1567 | CB | ILE | 193 | 78.304 | 44.122 | −23.137 | 1.00 | 36.83 | | C |
| ATOM | 1568 | CG2 | ILE | 193 | 79.335 | 45.101 | −23.684 | 1.00 | 36.83 | | C |
| ATOM | 1569 | CG1 | ILE | 193 | 77.619 | 43.398 | −24.308 | 1.00 | 36.83 | | C |
| ATOM | 1570 | CD1 | ILE | 193 | 78.519 | 42.432 | −25.047 | 1.00 | 36.83 | | C |
| ATOM | 1571 | C | ILE | 193 | 79.534 | 43.858 | −20.954 | 1.00 | 36.83 | | C |
| ATOM | 1572 | O | ILE | 193 | 80.737 | 43.957 | −20.768 | 1.00 | 36.83 | | O |
| ATOM | 1573 | N | GLN | 194 | 78.637 | 44.356 | −20.107 | 1.00 | 36.83 | | N |
| ATOM | 1574 | CA | GLN | 194 | 79.019 | 45.079 | −18.887 | 1.00 | 36.83 | | C |
| ATOM | 1575 | CB | GLN | 194 | 77.817 | 45.274 | −17.960 | 1.00 | 36.83 | | C |
| ATOM | 1576 | CG | GLN | 194 | 78.156 | 45.983 | −16.651 | 1.00 | 36.83 | | C |
| ATOM | 1577 | CD | GLN | 194 | 77.055 | 45.857 | −15.622 | 1.00 | 36.83 | | C |
| ATOM | 1578 | OE1 | GLN | 194 | 75.871 | 45.967 | −15.951 | 1.00 | 36.83 | | O |
| ATOM | 1579 | NE2 | GLN | 194 | 77.429 | 45.635 | −14.375 | 1.00 | 36.83 | | N |
| ATOM | 1580 | C | GLN | 194 | 80.098 | 44.365 | −18.096 | 1.00 | 36.83 | | C |
| ATOM | 1581 | O | GLN | 194 | 81.109 | 44.966 | −17.731 | 1.00 | 36.83 | | O |
| ATOM | 1582 | N | TYR | 195 | 79.880 | 43.086 | −17.817 | 1.00 | 36.83 | | N |
| ATOM | 1583 | CA | TYR | 195 | 80.852 | 42.301 | −17.057 | 1.00 | 36.83 | | C |
| ATOM | 1584 | CB | TYR | 195 | 80.328 | 40.900 | −16.780 | 1.00 | 36.83 | | C |
| ATOM | 1585 | CG | TYR | 195 | 81.212 | 40.089 | −15.864 | 1.00 | 36.83 | | C |
| ATOM | 1586 | CD1 | TYR | 195 | 81.161 | 40.273 | −14.483 | 1.00 | 36.83 | | C |
| ATOM | 1587 | CE1 | TYR | 195 | 81.919 | 39.489 | −13.614 | 1.00 | 36.83 | | C |
| ATOM | 1588 | CD2 | TYR | 195 | 82.058 | 39.102 | −16.367 | 1.00 | 36.83 | | C |
| ATOM | 1589 | CE2 | TYR | 195 | 82.832 | 38.306 | −15.505 | 1.00 | 36.83 | | C |
| ATOM | 1590 | CZ | TYR | 195 | 82.748 | 38.509 | −14.126 | 1.00 | 36.83 | | C |
| ATOM | 1591 | OH | TYR | 195 | 83.469 | 37.727 | −13.252 | 1.00 | 36.83 | | O |
| ATOM | 1592 | C | TYR | 195 | 82.176 | 42.174 | −17.784 | 1.00 | 36.83 | | C |
| ATOM | 1593 | O | TYR | 195 | 83.224 | 42.376 | −17.182 | 1.00 | 36.83 | | O |
| ATOM | 1594 | N | LEU | 196 | 82.132 | 41.820 | −19.066 | 1.00 | 36.83 | | N |
| ATOM | 1595 | CA | LEU | 196 | 83.348 | 41.667 | −19.860 | 1.00 | 36.83 | | C |
| ATOM | 1596 | CB | LEU | 196 | 83.012 | 41.254 | −21.291 | 1.00 | 36.83 | | C |
| ATOM | 1597 | CG | LEU | 196 | 82.812 | 39.760 | −21.523 | 1.00 | 36.83 | | C |
| ATOM | 1598 | CD1 | LEU | 196 | 81.811 | 39.225 | −20.521 | 1.00 | 36.83 | | C |
| ATOM | 1599 | CD2 | LEU | 196 | 82.344 | 39.522 | −22.957 | 1.00 | 36.83 | | C |
| ATOM | 1600 | C | LEU | 196 | 84.169 | 42.944 | −19.901 | 1.00 | 36.83 | | C |
| ATOM | 1601 | O | LEU | 196 | 85.389 | 42.902 | −19.824 | 1.00 | 36.83 | | O |
| ATOM | 1602 | N | ALA | 197 | 83.490 | 44.076 | −20.025 | 1.00 | 36.83 | | N |
| ATOM | 1603 | CA | ALA | 197 | 84.153 | 45.364 | −20.087 | 1.00 | 36.83 | | C |
| ATOM | 1604 | CB | ALA | 197 | 83.132 | 46.444 | −20.362 | 1.00 | 36.83 | | C |
| ATOM | 1605 | C | ALA | 197 | 84.898 | 45.684 | −18.793 | 1.00 | 36.83 | | C |
| ATOM | 1606 | O | ALA | 197 | 85.914 | 46.394 | −18.793 | 1.00 | 36.83 | | O |
| ATOM | 1607 | N | SER | 198 | 84.389 | 45.168 | −17.683 | 1.00 | 36.83 | | N |
| ATOM | 1608 | CA | SER | 198 | 84.995 | 45.443 | −16.401 | 1.00 | 36.83 | | C |
| ATOM | 1609 | CB | SER | 198 | 83.911 | 45.470 | −15.327 | 1.00 | 36.83 | | C |
| ATOM | 1610 | OG | SER | 198 | 84.455 | 45.718 | −14.048 | 1.00 | 36.83 | | O |
| ATOM | 1611 | C | SER | 198 | 86.084 | 44.442 | −16.042 | 1.00 | 36.83 | | C |
| ATOM | 1612 | O | SER | 198 | 87.223 | 44.823 | −15.780 | 1.00 | 36.83 | | O |
| ATOM | 1613 | N | VAL | 199 | 85.746 | 43.161 | −16.053 | 1.00 | 36.83 | | N |
| ATOM | 1614 | CA | VAL | 199 | 86.707 | 42.131 | −15.709 | 1.00 | 36.83 | | C |
| ATOM | 1615 | CB | VAL | 199 | 86.034 | 40.748 | −15.776 | 1.00 | 36.83 | | C |
| ATOM | 1616 | CG1 | VAL | 199 | 86.117 | 40.184 | −17.186 | 1.00 | 36.83 | | C |
| ATOM | 1617 | CG2 | VAL | 199 | 86.653 | 39.813 | −14.758 | 1.00 | 36.83 | | C |
| ATOM | 1618 | C | VAL | 199 | 87.950 | 42.168 | −16.610 | 1.00 | 36.83 | | C |
| ATOM | 1619 | O | VAL | 199 | 88.983 | 41.581 | −16.270 | 1.00 | 36.83 | | O |
| ATOM | 1620 | N | ALA | 200 | 87.859 | 42.875 | −17.743 | 1.00 | 36.83 | | N |
| ATOM | 1621 | CA | ALA | 200 | 88.980 | 42.975 | −18.689 | 1.00 | 36.83 | | C |
| ATOM | 1622 | CB | ALA | 200 | 88.732 | 42.047 | −19.881 | 1.00 | 36.83 | | C |
| ATOM | 1623 | C | ALA | 200 | 89.313 | 44.398 | −19.196 | 1.00 | 36.83 | | C |
| ATOM | 1624 | O | ALA | 200 | 89.948 | 44.552 | −20.244 | 1.00 | 36.83 | | O |
| ATOM | 1625 | N | GLY | 201 | 88.882 | 45.426 | −18.470 | 1.00 | 36.83 | | N |
| ATOM | 1626 | CA | GLY | 201 | 89.179 | 46.800 | −18.863 | 1.00 | 36.83 | | C |
| ATOM | 1627 | C | GLY | 201 | 90.656 | 47.148 | −18.681 | 1.00 | 36.83 | | C |
| ATOM | 1628 | O | GLY | 201 | 91.457 | 46.263 | −18.355 | 1.00 | 36.83 | | O |
| ATOM | 1629 | N | ARG | 202 | 91.042 | 48.417 | −18.864 | 1.00 | 36.83 | | N |
| ATOM | 1630 | CA | ARG | 202 | 92.465 | 48.779 | −18.726 | 1.00 | 36.83 | | C |
| ATOM | 1631 | CB | ARG | 202 | 92.832 | 49.875 | −19.742 | 1.00 | 36.83 | | C |
| ATOM | 1632 | CG | ARG | 202 | 93.030 | 49.368 | −21.189 | 1.00 | 36.83 | | C |
| ATOM | 1633 | CD | ARG | 202 | 94.121 | 48.273 | −21.313 | 1.00 | 36.83 | | C |
| ATOM | 1634 | NE | ARG | 202 | 94.345 | 47.871 | −22.708 | 1.00 | 36.83 | | N |
| ATOM | 1635 | CZ | ARG | 202 | 95.294 | 47.025 | −23.122 | 1.00 | 36.83 | | C |
| ATOM | 1636 | NH1 | ARG | 202 | 96.136 | 46.470 | −22.256 | 1.00 | 36.83 | | N |
| ATOM | 1637 | NH2 | ARG | 202 | 95.395 | 46.729 | −24.415 | 1.00 | 36.83 | | N |
| ATOM | 1638 | C | ARG | 202 | 93.014 | 49.167 | −17.327 | 1.00 | 36.83 | | C |
| ATOM | 1639 | O | ARG | 202 | 92.352 | 49.005 | −16.292 | 1.00 | 36.83 | | O |
| ATOM | 1640 | N | ASN | 203 | 94.249 | 49.666 | −17.317 | 0.00 | 36.83 | | N |
| ATOM | 1641 | CA | ASN | 203 | 94.932 | 50.058 | −16.081 | 0.00 | 36.83 | | C |
| ATOM | 1642 | CB | ASN | 203 | 96.431 | 49.768 | −16.202 | 0.00 | 36.83 | | C |
| ATOM | 1643 | CG | ASN | 203 | 96.721 | 48.321 | −16.544 | 0.00 | 36.83 | | C |
| ATOM | 1644 | OD1 | ASN | 203 | 96.363 | 47.410 | −15.798 | 0.00 | 36.83 | | O |
| ATOM | 1645 | ND2 | ASN | 203 | 97.374 | 48.102 | −17.680 | 0.00 | 36.83 | | N |
| ATOM | 1646 | C | ASN | 203 | 94.733 | 51.527 | −15.711 | 0.00 | 36.83 | | C |
| ATOM | 1647 | O | ASN | 203 | 93.603 | 51.987 | −15.562 | 0.00 | 36.83 | | O |
| ATOM | 1648 | N | GLN | 204 | 95.840 | 52.253 | −15.551 | 1.00 | 36.83 | | N |
| ATOM | 1649 | CA | GLN | 204 | 95.792 | 53.676 | −15.199 | 1.00 | 36.83 | | C |
| ATOM | 1650 | CB | GLN | 204 | 96.525 | 53.918 | −13.870 | 1.00 | 36.83 | | C |
| ATOM | 1651 | CG | GLN | 204 | 98.038 | 53.721 | −13.943 | 1.00 | 36.83 | | C |
| ATOM | 1652 | CD | GLN | 204 | 98.427 | 52.499 | −14.771 | 1.00 | 36.83 | | C |
| ATOM | 1653 | OE1 | GLN | 204 | 98.282 | 52.493 | −16.003 | 1.00 | 36.83 | | O |
| ATOM | 1654 | NE2 | GLN | 204 | 98.921 | 51.452 | −14.095 | 1.00 | 36.83 | | N |
| ATOM | 1655 | C | GLN | 204 | 96.404 | 54.572 | −16.286 | 1.00 | 36.83 | | C |
| ATOM | 1656 | O | GLN | 204 | 96.765 | 54.102 | −17.382 | 1.00 | 36.83 | | O |
| ATOM | 1657 | N | ALA | 205 | 96.521 | 55.860 | −15.962 | 1.00 | 36.83 | | N |
| ATOM | 1658 | CA | ALA | 205 | 97.084 | 56.878 | −16.863 | 1.00 | 36.83 | | C |
| ATOM | 1659 | CB | ALA | 205 | 98.409 | 56.392 | −17.444 | 1.00 | 36.83 | | C |
| ATOM | 1660 | C | ALA | 205 | 96.134 | 57.248 | −18.000 | 1.00 | 36.83 | | C |
| ATOM | 1661 | O | ALA | 205 | 95.241 | 58.094 | −17.847 | 1.00 | 36.83 | | O |
| ATOM | 1662 | N | ASN | 206 | 96.339 | 56.589 | −19.134 | 0.00 | 36.83 | | N |
| ATOM | 1663 | CA | ASN | 206 | 95.558 | 56.798 | −20.346 | 0.00 | 36.83 | | C |
| ATOM | 1664 | CB | ASN | 206 | 96.507 | 56.828 | −21.533 | 0.00 | 36.83 | | C |
| ATOM | 1665 | CG | ASN | 206 | 97.468 | 55.659 | −21.517 | 0.00 | 36.83 | | C |
| ATOM | 1666 | OD1 | ASN | 206 | 97.057 | 54.503 | −21.629 | 0.00 | 36.83 | | O |
| ATOM | 1667 | ND2 | ASN | 206 | 98.753 | 55.948 | −21.359 | 0.00 | 36.83 | | N |
| ATOM | 1668 | C | ASN | 206 | 94.555 | 55.665 | −20.529 | 0.00 | 36.83 | | C |
| ATOM | 1669 | O | ASN | 206 | 94.654 | 54.633 | −19.867 | 0.00 | 36.83 | | O |
| ATOM | 1670 | N | GLY | 207 | 93.605 | 55.858 | −21.442 | 1.00 | 36.83 | | N |
| ATOM | 1671 | CA | GLY | 207 | 92.594 | 54.840 | −21.700 | 1.00 | 36.83 | | C |
| ATOM | 1672 | C | GLY | 207 | 91.916 | 54.404 | −20.419 | 1.00 | 36.83 | | C |
| ATOM | 1673 | O | GLY | 207 | 90.827 | 54.886 | −20.077 | 1.00 | 36.83 | | O |
| ATOM | 1674 | N | SER | 208 | 92.566 | 53.488 | −19.704 | 1.00 | 36.83 | | N |
| ATOM | 1675 | CA | SER | 208 | 92.061 | 52.980 | −18.421 | 1.00 | 36.83 | | C |
| ATOM | 1676 | CB | SER | 208 | 92.187 | 54.063 | −17.341 | 1.00 | 36.83 | | C |
| ATOM | 1677 | OG | SER | 208 | 91.889 | 53.545 | −16.048 | 1.00 | 36.83 | | O |
| ATOM | 1678 | C | SER | 208 | 90.612 | 52.510 | −18.496 | 1.00 | 36.83 | | C |
| ATOM | 1679 | O | SER | 208 | 90.074 | 51.976 | −17.517 | 1.00 | 36.83 | | O |
| ATOM | 1680 | N | GLY | 209 | 90.001 | 52.711 | −19.664 | 1.00 | 36.83 | | N |
| ATOM | 1681 | CA | GLY | 209 | 88.619 | 52.330 | −19.894 | 1.00 | 36.83 | | C |
| ATOM | 1682 | C | GLY | 209 | 87.936 | 53.223 | −20.922 | 1.00 | 36.83 | | C |
| ATOM | 1683 | O | GLY | 209 | 86.763 | 53.564 | −20.770 | 1.00 | 36.83 | | O |
| ATOM | 1684 | N | VAL | 210 | 88.641 | 53.613 | −21.974 | 1.00 | 36.83 | | N |
| ATOM | 1685 | CA | VAL | 210 | 88.017 | 54.473 | −22.979 | 1.00 | 36.83 | | C |
| ATOM | 1686 | CB | VAL | 210 | 89.064 | 55.318 | −23.741 | 1.00 | 36.83 | | C |
| ATOM | 1687 | CG1 | VAL | 210 | 88.352 | 56.158 | −24.822 | 1.00 | 36.83 | | C |
| ATOM | 1688 | CG2 | VAL | 210 | 89.813 | 56.226 | −22.766 | 1.00 | 36.83 | | C |
| ATOM | 1689 | C | VAL | 210 | 87.200 | 53.668 | −23.999 | 1.00 | 36.83 | | C |
| ATOM | 1690 | O | VAL | 210 | 86.012 | 53.908 | −24.189 | 1.00 | 36.83 | | O |
| ATOM | 1691 | N | LEU | 211 | 87.859 | 52.734 | −24.673 | 1.00 | 36.83 | | N |
| ATOM | 1692 | CA | LEU | 211 | 87.190 | 51.873 | −25.642 | 1.00 | 36.83 | | C |
| ATOM | 1693 | CB | LEU | 211 | 88.154 | 50.771 | −26.102 | 1.00 | 36.83 | | C |
| ATOM | 1694 | CG | LEU | 211 | 88.018 | 50.159 | −27.497 | 1.00 | 36.83 | | C |
| ATOM | 1695 | CD1 | LEU | 211 | 88.980 | 48.985 | −27.617 | 1.00 | 36.83 | | C |
| ATOM | 1696 | CD2 | LEU | 211 | 86.598 | 49.687 | −27.736 | 1.00 | 36.83 | | C |
| ATOM | 1697 | C | LEU | 211 | 86.026 | 51.257 | −24.851 | 1.00 | 36.83 | | C |
| ATOM | 1698 | O | LEU | 211 | 84.895 | 51.145 | −25.336 | 1.00 | 36.83 | | O |
| ATOM | 1699 | N | GLU | 212 | 86.325 | 50.895 | −23.609 | 1.00 | 36.83 | | N |
| ATOM | 1700 | CA | GLU | 212 | 85.354 | 50.287 | −22.712 | 1.00 | 36.83 | | C |
| ATOM | 1701 | CB | GLU | 212 | 85.935 | 50.201 | −21.299 | 1.00 | 36.83 | | C |
| ATOM | 1702 | CG | GLU | 212 | 86.906 | 49.048 | −21.051 | 1.00 | 36.83 | | C |
| ATOM | 1703 | CD | GLU | 212 | 88.251 | 49.190 | −21.765 | 1.00 | 36.83 | | C |
| ATOM | 1704 | OE1 | GLU | 212 | 88.830 | 50.303 | −21.754 | 1.00 | 36.83 | | O |
| ATOM | 1705 | OE2 | GLU | 212 | 88.738 | 48.173 | −22.317 | 1.00 | 36.83 | | O |
| ATOM | 1706 | C | GLU | 212 | 83.996 | 50.995 | −22.663 | 1.00 | 36.83 | | C |
| ATOM | 1707 | O | GLU | 212 | 82.963 | 50.344 | −22.814 | 1.00 | 36.83 | | O |
| ATOM | 1708 | N | GLN | 213 | 83.986 | 52.311 | −22.454 | 1.00 | 36.83 | | N |
| ATOM | 1709 | CA | GLN | 213 | 82.723 | 53.050 | −22.381 | 1.00 | 36.83 | | C |
| ATOM | 1710 | CB | GLN | 213 | 82.937 | 54.445 | −21.774 | 1.00 | 36.83 | | C |
| ATOM | 1711 | CG | GLN | 213 | 82.972 | 54.492 | −20.231 | 1.00 | 36.83 | | C |
| ATOM | 1712 | CD | GLN | 213 | 81.597 | 54.351 | −19.578 | 1.00 | 36.83 | | C |
| ATOM | 1713 | OE1 | GLN | 213 | 80.693 | 55.179 | −19.802 | 1.00 | 36.83 | | O |
| ATOM | 1714 | NE2 | GLN | 213 | 81.430 | 53.304 | −18.758 | 1.00 | 36.83 | | N |
| ATOM | 1715 | C | GLN | 213 | 82.014 | 53.200 | −23.721 | 1.00 | 36.83 | | C |
| ATOM | 1716 | O | GLN | 213 | 80.785 | 53.326 | −23.778 | 1.00 | 36.83 | | O |
| ATOM | 1717 | N | GLN | 214 | 82.784 | 53.202 | −24.800 | 1.00 | 36.83 | | N |
| ATOM | 1718 | CA | GLN | 214 | 82.205 | 53.335 | −26.122 | 1.00 | 36.83 | | C |
| ATOM | 1719 | CB | GLN | 214 | 83.301 | 53.675 | −27.123 | 1.00 | 36.83 | | C |
| ATOM | 1720 | CG | GLN | 214 | 84.051 | 54.921 | −26.705 | 1.00 | 36.83 | | C |
| ATOM | 1721 | CD | GLN | 214 | 85.036 | 55.398 | −27.742 | 1.00 | 36.83 | | C |
| ATOM | 1722 | OE1 | GLN | 214 | 85.964 | 54.681 | −28.109 | 1.00 | 36.83 | | O |
| ATOM | 1723 | NE2 | GLN | 214 | 84.841 | 56.620 | −28.219 | 1.00 | 36.83 | | N |
| ATOM | 1724 | C | GLN | 214 | 81.508 | 52.033 | −26.486 | 1.00 | 36.83 | | C |
| ATOM | 1725 | O | GLN | 214 | 80.455 | 52.033 | −27.127 | 1.00 | 36.83 | | O |
| ATOM | 1726 | N | ILE | 215 | 82.097 | 50.918 | −26.068 | 1.00 | 36.83 | | N |
| ATOM | 1727 | CA | ILE | 215 | 81.503 | 49.625 | −26.339 | 1.00 | 36.83 | | C |
| ATOM | 1728 | CB | ILE | 215 | 82.347 | 48.490 | −25.746 | 1.00 | 36.83 | | C |
| ATOM | 1729 | CG2 | ILE | 215 | 81.608 | 47.153 | −25.902 | 1.00 | 36.83 | | C |
| ATOM | 1730 | CG1 | ILE | 215 | 83.704 | 48.451 | −26.445 | 1.00 | 36.83 | | C |
| ATOM | 1731 | CD1 | ILE | 215 | 84.510 | 47.204 | −26.190 | 1.00 | 36.83 | | C |
| ATOM | 1732 | C | ILE | 215 | 80.126 | 49.614 | −25.699 | 1.00 | 36.83 | | C |
| ATOM | 1733 | O | ILE | 215 | 79.144 | 49.208 | −26.318 | 1.00 | 36.83 | | O |
| ATOM | 1734 | N | LEU | 216 | 80.059 | 50.083 | −24.457 | 1.00 | 36.83 | | N |
| ATOM | 1735 | CA | LEU | 216 | 78.809 | 50.137 | −23.719 | 1.00 | 36.83 | | C |
| ATOM | 1736 | CB | LEU | 216 | 79.065 | 50.602 | −22.288 | 1.00 | 36.83 | | C |
| ATOM | 1737 | CG | LEU | 216 | 79.945 | 49.733 | −21.384 | 1.00 | 36.83 | | C |
| ATOM | 1738 | CD1 | LEU | 216 | 80.145 | 50.456 | −20.061 | 1.00 | 36.83 | | C |
| ATOM | 1739 | CD2 | LEU | 216 | 79.297 | 48.378 | −21.152 | 1.00 | 36.83 | | C |
| ATOM | 1740 | C | LEU | 216 | 77.816 | 51.078 | −24.363 | 1.00 | 36.83 | | C |
| ATOM | 1741 | O | LEU | 216 | 76.635 | 50.759 | −24.526 | 1.00 | 36.83 | | O |
| ATOM | 1742 | N | GLN | 217 | 78.301 | 52.248 | −24.740 | 1.00 | 36.83 | | N |
| ATOM | 1743 | CA | GLN | 217 | 77.438 | 53.263 | −25.329 | 1.00 | 36.83 | | C |
| ATOM | 1744 | CB | GLN | 217 | 78.195 | 54.592 | −25.413 | 1.00 | 36.83 | | C |
| ATOM | 1745 | CG | GLN | 217 | 77.290 | 55.795 | −25.154 | 1.00 | 36.83 | | C |
| ATOM | 1746 | CD | GLN | 217 | 76.847 | 55.909 | −23.703 | 1.00 | 36.83 | | C |
| ATOM | 1747 | OE1 | GLN | 217 | 75.916 | 56.651 | −23.388 | 1.00 | 36.83 | | O |
| ATOM | 1748 | NE2 | GLN | 217 | 77.521 | 55.182 | −22.809 | 1.00 | 36.83 | | N |
| ATOM | 1749 | C | GLN | 217 | 76.849 | 52.898 | −26.689 | 1.00 | 36.83 | | C |
| ATOM | 1750 | O | GLN | 217 | 75.867 | 53.495 | −27.123 | 1.00 | 36.83 | | O |
| ATOM | 1751 | N | ALA | 218 | 77.442 | 51.919 | −27.360 | 1.00 | 36.83 | | N |
| ATOM | 1752 | CA | ALA | 218 | 76.951 | 51.475 | −28.655 | 1.00 | 36.83 | | C |
| ATOM | 1753 | CB | ALA | 218 | 77.756 | 50.270 | −29.117 | 1.00 | 36.83 | | C |
| ATOM | 1754 | C | ALA | 218 | 75.465 | 51.104 | −28.563 | 1.00 | 36.83 | | C |
| ATOM | 1755 | O | ALA | 218 | 74.649 | 51.517 | −29.393 | 1.00 | 36.83 | | O |
| ATOM | 1756 | N | ASN | 219 | 75.123 | 50.336 | −27.532 | 1.00 | 36.83 | | N |
| ATOM | 1757 | CA | ASN | 219 | 73.761 | 49.869 | −27.309 | 1.00 | 36.83 | | C |
| ATOM | 1758 | CB | ASN | 219 | 73.678 | 49.134 | −25.967 | 1.00 | 36.83 | | C |
| ATOM | 1759 | CG | ASN | 219 | 72.432 | 48.297 | −25.859 | 1.00 | 36.83 | | C |
| ATOM | 1760 | OD1 | ASN | 219 | 72.464 | 47.074 | −26.046 | 1.00 | 36.83 | | O |
| ATOM | 1761 | ND2 | ASN | 219 | 71.311 | 48.951 | −25.592 | 1.00 | 36.83 | | N |
| ATOM | 1762 | C | ASN | 219 | 72.645 | 50.927 | −27.373 | 1.00 | 36.83 | | C |
| ATOM | 1763 | O | ASN | 219 | 71.733 | 50.818 | −28.191 | 1.00 | 36.83 | | O |
| ATOM | 1764 | N | PRO | 220 | 72.687 | 51.950 | −26.506 | 1.00 | 36.83 | | N |
| ATOM | 1765 | CD | PRO | 220 | 73.645 | 52.260 | −25.429 | 1.00 | 36.83 | | C |
| ATOM | 1766 | CA | PRO | 220 | 71.631 | 52.963 | −26.554 | 1.00 | 36.83 | | C |
| ATOM | 1767 | CB | PRO | 220 | 72.119 | 54.017 | −25.558 | 1.00 | 36.83 | | C |
| ATOM | 1768 | CG | PRO | 220 | 72.836 | 53.203 | −24.547 | 1.00 | 36.83 | | C |
| ATOM | 1769 | C | PRO | 220 | 71.413 | 53.539 | −27.950 | 1.00 | 36.83 | | C |
| ATOM | 1770 | O | PRO | 220 | 70.294 | 53.914 | −28.311 | 1.00 | 36.83 | | O |
| ATOM | 1771 | N | ILE | 221 | 72.470 | 53.627 | −28.742 | 1.00 | 36.83 | | N |
| ATOM | 1772 | CA | ILE | 221 | 72.286 | 54.162 | −30.077 | 1.00 | 36.83 | | C |
| ATOM | 1773 | CB | ILE | 221 | 73.618 | 54.340 | −30.814 | 1.00 | 36.83 | | C |
| ATOM | 1774 | CG2 | ILE | 221 | 73.361 | 54.727 | −32.255 | 1.00 | 36.83 | | C |
| ATOM | 1775 | CG1 | ILE | 221 | 74.453 | 55.418 | −30.119 | 1.00 | 36.83 | | C |
| ATOM | 1776 | CD1 | ILE | 221 | 75.833 | 55.616 | −30.733 | 1.00 | 36.83 | | C |
| ATOM | 1777 | C | ILE | 221 | 71.416 | 53.183 | −30.848 | 1.00 | 36.83 | | C |
| ATOM | 1778 | O | ILE | 221 | 70.311 | 53.521 | −31.270 | 1.00 | 36.83 | | O |
| ATOM | 1779 | N | LEU | 222 | 71.903 | 51.958 | −30.997 | 1.00 | 36.83 | | N |
| ATOM | 1780 | CA | LEU | 222 | 71.164 | 50.937 | −31.727 | 1.00 | 36.83 | | C |
| ATOM | 1781 | CB | LEU | 222 | 71.940 | 49.620 | −31.721 | 1.00 | 36.83 | | C |
| ATOM | 1782 | CG | LEU | 222 | 73.267 | 49.620 | −32.482 | 1.00 | 36.83 | | C |
| ATOM | 1783 | CD1 | LEU | 222 | 73.762 | 48.197 | −32.596 | 1.00 | 36.83 | | C |
| ATOM | 1784 | CD2 | LEU | 222 | 73.086 | 50.178 | −33.877 | 1.00 | 36.83 | | C |
| ATOM | 1785 | C | LEU | 222 | 69.749 | 50.716 | −31.203 | 1.00 | 36.83 | | C |
| ATOM | 1786 | O | LEU | 222 | 68.795 | 50.634 | −31.977 | 1.00 | 36.83 | | O |
| ATOM | 1787 | N | GLU | 223 | 69.604 | 50.651 | −29.887 | 1.00 | 36.83 | | N |
| ATOM | 1788 | CA | GLU | 223 | 68.296 | 50.429 | −29.290 | 1.00 | 36.83 | | C |
| ATOM | 1789 | CB | GLU | 223 | 68.430 | 50.411 | −27.768 | 1.00 | 36.83 | | C |
| ATOM | 1790 | CG | GLU | 223 | 67.293 | 49.716 | −27.043 | 1.00 | 36.83 | | C |
| ATOM | 1791 | CD | GLU | 223 | 67.801 | 48.874 | −25.874 | 1.00 | 36.83 | | C |
| ATOM | 1792 | OE1 | GLU | 223 | 67.386 | 49.135 | −24.731 | 1.00 | 36.83 | | O |
| ATOM | 1793 | OE2 | GLU | 223 | 68.619 | 47.950 | −26.105 | 1.00 | 36.83 | | O |
| ATOM | 1794 | C | GLU | 223 | 67.265 | 51.478 | −29.706 | 1.00 | 36.83 | | C |
| ATOM | 1795 | O | GLU | 223 | 66.104 | 51.151 | −29.962 | 1.00 | 36.83 | | O |
| ATOM | 1796 | N | ALA | 224 | 67.682 | 52.740 | −29.772 | 1.00 | 36.83 | | N |
| ATOM | 1797 | CA | ALA | 224 | 66.766 | 53.808 | −30.144 | 1.00 | 36.83 | | C |
| ATOM | 1798 | CB | ALA | 224 | 67.451 | 55.179 | −29.999 | 1.00 | 36.83 | | C |
| ATOM | 1799 | C | ALA | 224 | 66.223 | 53.637 | −31.559 | 1.00 | 36.83 | | C |
| ATOM | 1800 | O | ALA | 224 | 65.037 | 53.895 | −31.801 | 1.00 | 36.83 | | O |
| ATOM | 1801 | N | PHE | 225 | 67.073 | 53.188 | −32.483 | 1.00 | 36.83 | | N |
| ATOM | 1802 | CA | PHE | 225 | 66.662 | 53.002 | −33.874 | 1.00 | 36.83 | | C |
| ATOM | 1803 | CB | PHE | 225 | 67.797 | 53.395 | −34.834 | 1.00 | 36.83 | | C |
| ATOM | 1804 | CG | PHE | 225 | 68.254 | 54.828 | −34.702 | 1.00 | 36.83 | | C |
| ATOM | 1805 | CD1 | PHE | 225 | 69.057 | 55.224 | −33.633 | 1.00 | 36.83 | | C |
| ATOM | 1806 | CD2 | PHE | 225 | 67.893 | 55.779 | −35.660 | 1.00 | 36.83 | | C |
| ATOM | 1807 | CE1 | PHE | 225 | 69.494 | 56.546 | −33.524 | 1.00 | 36.83 | | C |
| ATOM | 1808 | CE2 | PHE | 225 | 68.324 | 57.102 | −35.560 | 1.00 | 36.83 | | C |
| ATOM | 1809 | CZ | PHE | 225 | 69.125 | 57.486 | −34.493 | 1.00 | 36.83 | | C |
| ATOM | 1810 | C | PHE | 225 | 66.215 | 51.580 | −34.227 | 1.00 | 36.83 | | C |
| ATOM | 1811 | O | PHE | 225 | 65.475 | 51.379 | −35.192 | 1.00 | 36.83 | | O |
| ATOM | 1812 | N | GLY | 226 | 66.670 | 50.596 | −33.453 | 1.00 | 36.83 | | N |
| ATOM | 1813 | CA | GLY | 226 | 66.310 | 49.217 | −33.732 | 1.00 | 36.83 | | C |
| ATOM | 1814 | C | GLY | 226 | 65.250 | 48.578 | −32.851 | 1.00 | 36.83 | | C |
| ATOM | 1815 | O | GLY | 226 | 64.865 | 47.432 | −33.098 | 1.00 | 36.83 | | O |
| ATOM | 1816 | N | ASN | 227 | 64.778 | 49.293 | −31.832 | 1.00 | 36.83 | | N |
| ATOM | 1817 | CA | ASN | 227 | 63.759 | 48.755 | −30.932 | 1.00 | 36.83 | | C |
| ATOM | 1818 | CB | ASN | 227 | 64.263 | 48.749 | −29.480 | 1.00 | 36.83 | | C |
| ATOM | 1819 | CG | ASN | 227 | 65.354 | 47.698 | −29.234 | 1.00 | 36.83 | | C |
| ATOM | 1820 | OD1 | ASN | 227 | 66.299 | 47.578 | −30.006 | 1.00 | 36.83 | | O |
| ATOM | 1821 | ND2 | ASN | 227 | 65.221 | 46.945 | −28.146 | 1.00 | 36.83 | | N |
| ATOM | 1822 | C | ASN | 227 | 62.431 | 49.504 | −31.014 | 1.00 | 36.83 | | C |
| ATOM | 1823 | O | ASN | 227 | 62.386 | 50.680 | −31.379 | 1.00 | 36.83 | | O |
| ATOM | 1824 | N | ALA | 228 | 61.351 | 48.800 | −30.684 | 1.00 | 36.83 | | N |
| ATOM | 1825 | CA | ALA | 228 | 60.015 | 49.369 | −30.717 | 1.00 | 36.83 | | C |
| ATOM | 1826 | CB | ALA | 228 | 59.504 | 49.429 | −32.140 | 1.00 | 36.83 | | C |
| ATOM | 1827 | C | ALA | 228 | 59.042 | 48.582 | −29.853 | 1.00 | 36.83 | | C |
| ATOM | 1828 | O | ALA | 228 | 59.319 | 47.459 | −29.432 | 1.00 | 36.83 | | O |
| ATOM | 1829 | N | LYS | 229 | 57.898 | 49.195 | −29.592 | 1.00 | 36.83 | | N |
| ATOM | 1830 | CA | LYS | 229 | 56.851 | 48.587 | −28.781 | 1.00 | 36.83 | | C |
| ATOM | 1831 | CB | LYS | 229 | 55.955 | 49.675 | −28.161 | 1.00 | 36.83 | | C |
| ATOM | 1832 | CG | LYS | 229 | 54.778 | 49.139 | −27.345 | 1.00 | 36.83 | | C |
| ATOM | 1833 | CD | LYS | 229 | 53.838 | 50.257 | −26.914 | 1.00 | 36.83 | | C |
| ATOM | 1834 | CE | LYS | 229 | 52.808 | 49.796 | −25.876 | 1.00 | 36.83 | | C |
| ATOM | 1835 | NZ | LYS | 229 | 51.706 | 48.970 | −26.416 | 1.00 | 36.83 | | N |
| ATOM | 1836 | C | LYS | 229 | 55.971 | 47.633 | −29.589 | 1.00 | 36.83 | | C |
| ATOM | 1837 | O | LYS | 229 | 55.260 | 48.048 | −30.500 | 1.00 | 36.83 | | O |
| ATOM | 1838 | N | THR | 230 | 56.045 | 46.351 | −29.261 | 1.00 | 36.83 | | N |
| ATOM | 1839 | CA | THR | 230 | 55.198 | 45.371 | −29.916 | 1.00 | 36.83 | | C |
| ATOM | 1840 | CB | THR | 230 | 55.974 | 44.147 | −30.479 | 1.00 | 36.83 | | C |
| ATOM | 1841 | OG1 | THR | 230 | 56.319 | 43.270 | −29.407 | 1.00 | 36.83 | | O |
| ATOM | 1842 | CG2 | THR | 230 | 57.230 | 44.583 | −31.232 | 1.00 | 36.83 | | C |
| ATOM | 1843 | C | THR | 230 | 54.297 | 44.906 | −28.774 | 1.00 | 36.83 | | C |
| ATOM | 1844 | O | THR | 230 | 54.596 | 45.163 | −27.597 | 1.00 | 36.83 | | O |
| ATOM | 1845 | N | THR | 231 | 53.198 | 44.245 | −29.115 | 1.00 | 36.83 | | N |
| ATOM | 1846 | CA | THR | 231 | 52.274 | 43.757 | −28.109 | 1.00 | 36.83 | | C |
| ATOM | 1847 | CB | THR | 231 | 51.043 | 43.123 | −28.763 | 1.00 | 36.83 | | C |
| ATOM | 1848 | OG1 | THR | 231 | 51.466 | 42.155 | −29.728 | 1.00 | 36.83 | | O |
| ATOM | 1849 | CG2 | THR | 231 | 50.210 | 44.179 | −29.452 | 1.00 | 36.83 | | C |
| ATOM | 1850 | C | THR | 231 | 52.949 | 42.723 | −27.213 | 1.00 | 36.83 | | C |
| ATOM | 1851 | O | THR | 231 | 52.448 | 42.396 | −26.147 | 1.00 | 36.83 | | O |
| ATOM | 1852 | N | ARG | 232 | 54.095 | 42.218 | −27.650 | 1.00 | 36.83 | | N |
| ATOM | 1853 | CA | ARG | 232 | 54.830 | 41.217 | −26.885 | 1.00 | 36.83 | | C |
| ATOM | 1854 | CB | ARG | 232 | 55.568 | 40.283 | −27.840 | 1.00 | 36.83 | | C |
| ATOM | 1855 | CG | ARG | 232 | 55.142 | 38.838 | −27.797 | 1.00 | 36.83 | | C |
| ATOM | 1856 | CD | ARG | 232 | 53.793 | 38.666 | −28.409 | 1.00 | 36.83 | | C |
| ATOM | 1857 | NE | ARG | 232 | 53.647 | 37.359 | −29.047 | 1.00 | 36.83 | | N |
| ATOM | 1858 | CZ | ARG | 232 | 53.617 | 36.200 | −28.401 | 1.00 | 36.83 | | C |
| ATOM | 1859 | NH1 | ARG | 232 | 53.726 | 36.153 | −27.083 | 1.00 | 36.83 | | N |
| ATOM | 1860 | NH2 | ARG | 232 | 53.450 | 35.084 | −29.082 | 1.00 | 36.83 | | N |
| ATOM | 1861 | C | ARG | 232 | 55.863 | 41.795 | −25.915 | 1.00 | 36.83 | | C |
| ATOM | 1862 | O | ARG | 232 | 56.250 | 41.130 | −24.952 | 1.00 | 36.83 | | O |
| ATOM | 1863 | N | ASN | 233 | 56.314 | 43.023 | −26.169 | 1.00 | 36.83 | | N |
| ATOM | 1864 | CA | ASN | 233 | 57.355 | 43.628 | −25.344 | 1.00 | 36.83 | | C |
| ATOM | 1865 | CB | ASN | 233 | 58.659 | 42.842 | −25.599 | 1.00 | 36.83 | | C |
| ATOM | 1866 | CG | ASN | 233 | 59.932 | 43.590 | −25.188 | 1.00 | 36.83 | | C |
| ATOM | 1867 | OD1 | ASN | 233 | 59.932 | 44.454 | −24.323 | 1.00 | 36.83 | | O |
| ATOM | 1868 | ND2 | ASN | 233 | 61.037 | 43.215 | −25.810 | 1.00 | 36.83 | | N |
| ATOM | 1869 | C | ASN | 233 | 57.504 | 45.118 | −25.652 | 1.00 | 36.83 | | C |
| ATOM | 1870 | O | ASN | 233 | 57.517 | 45.524 | −26.805 | 1.00 | 36.83 | | O |
| ATOM | 1871 | N | ASN | 234 | 57.606 | 45.931 | −24.610 | 1.00 | 36.83 | | N |
| ATOM | 1872 | CA | ASN | 234 | 57.746 | 47.373 | −24.782 | 1.00 | 36.83 | | C |
| ATOM | 1873 | CB | ASN | 234 | 57.549 | 48.085 | −23.434 | 1.00 | 36.83 | | C |
| ATOM | 1874 | CG | ASN | 234 | 56.139 | 47.936 | −22.900 | 1.00 | 36.83 | | C |
| ATOM | 1875 | OD1 | ASN | 234 | 55.165 | 48.181 | −23.608 | 1.00 | 36.83 | | O |
| ATOM | 1876 | ND2 | ASN | 234 | 56.024 | 47.534 | −21.651 | 1.00 | 36.83 | | N |
| ATOM | 1877 | C | ASN | 234 | 59.085 | 47.789 | −25.404 | 1.00 | 36.83 | | C |
| ATOM | 1878 | O | ASN | 234 | 59.183 | 48.833 | −26.041 | 1.00 | 36.83 | | O |
| ATOM | 1879 | N | ASN | 235 | 60.115 | 46.974 | −25.207 | 1.00 | 36.83 | | N |
| ATOM | 1880 | CA | ASN | 235 | 61.427 | 47.274 | −25.765 | 1.00 | 36.83 | | C |
| ATOM | 1881 | CB | ASN | 235 | 62.441 | 47.517 | −24.637 | 1.00 | 36.83 | | C |
| ATOM | 1882 | CG | ASN | 235 | 63.779 | 48.018 | −25.150 | 1.00 | 36.83 | | C |
| ATOM | 1883 | OD1 | ASN | 235 | 63.834 | 48.718 | −26.141 | 1.00 | 36.83 | | O |
| ATOM | 1884 | ND2 | ASN | 235 | 64.856 | 47.668 | −24.468 | 1.00 | 36.83 | | N |
| ATOM | 1885 | C | ASN | 235 | 61.896 | 46.142 | −26.661 | 1.00 | 36.83 | | C |
| ATOM | 1886 | O | ASN | 235 | 63.017 | 45.681 | −26.538 | 1.00 | 36.83 | | O |
| ATOM | 1887 | N | SER | 236 | 61.031 | 45.699 | −27.571 | 1.00 | 36.83 | | N |
| ATOM | 1888 | CA | SER | 236 | 61.365 | 44.601 | −28.498 | 1.00 | 36.83 | | C |
| ATOM | 1889 | CB | SER | 236 | 60.118 | 44.129 | −29.265 | 1.00 | 36.83 | | C |
| ATOM | 1890 | OG | SER | 236 | 60.476 | 43.211 | −30.291 | 1.00 | 36.83 | | O |
| ATOM | 1891 | C | SER | 236 | 62.453 | 44.935 | −29.517 | 1.00 | 36.83 | | C |
| ATOM | 1892 | O | SER | 236 | 62.424 | 45.994 | −30.147 | 1.00 | 36.83 | | O |
| ATOM | 1893 | N | SER | 237 | 63.411 | 44.017 | −29.665 | 1.00 | 36.83 | | N |
| ATOM | 1894 | CA | SER | 237 | 64.501 | 44.187 | −30.625 | 1.00 | 36.83 | | C |
| ATOM | 1895 | CB | SER | 237 | 65.694 | 43.301 | −30.253 | 1.00 | 36.83 | | C |
| ATOM | 1896 | OG | SER | 237 | 66.144 | 43.574 | −28.949 | 1.00 | 36.83 | | O |
| ATOM | 1897 | C | SER | 237 | 63.987 | 43.782 | −32.011 | 1.00 | 36.83 | | C |
| ATOM | 1898 | O | SER | 237 | 63.618 | 42.636 | −32.226 | 1.00 | 36.83 | | O |
| ATOM | 1899 | N | ARG | 238 | 63.962 | 44.714 | −32.948 | 1.00 | 36.83 | | N |
| ATOM | 1900 | CA | ARG | 238 | 63.465 | 44.390 | −34.271 | 1.00 | 36.83 | | C |
| ATOM | 1901 | CB | ARG | 238 | 62.581 | 45.521 | −34.791 | 1.00 | 36.83 | | C |
| ATOM | 1902 | CG | ARG | 238 | 61.442 | 45.892 | −33.849 | 1.00 | 36.83 | | C |
| ATOM | 1903 | CD | ARG | 238 | 60.704 | 44.672 | −33.290 | 1.00 | 36.83 | | C |
| ATOM | 1904 | NE | ARG | 238 | 59.926 | 43.945 | −34.292 | 1.00 | 36.83 | | N |
| ATOM | 1905 | CZ | ARG | 238 | 59.495 | 42.696 | −34.134 | 1.00 | 36.83 | | C |
| ATOM | 1906 | NH1 | ARG | 238 | 59.767 | 42.039 | −33.012 | 1.00 | 36.83 | | N |
| ATOM | 1907 | NH2 | ARG | 238 | 58.810 | 42.094 | −35.100 | 1.00 | 36.83 | | N |
| ATOM | 1908 | C | ARG | 238 | 64.587 | 44.076 | −35.256 | 1.00 | 36.83 | | C |
| ATOM | 1909 | O | ARG | 238 | 64.389 | 44.052 | −36.465 | 1.00 | 36.83 | | O |
| ATOM | 1910 | N | PHE | 239 | 65.774 | 43.854 | −34.716 | 1.00 | 36.83 | | N |
| ATOM | 1911 | CA | PHE | 239 | 66.939 | 43.491 | −35.501 | 1.00 | 36.83 | | C |
| ATOM | 1912 | CB | PHE | 239 | 67.799 | 44.709 | −35.854 | 1.00 | 36.83 | | C |
| ATOM | 1913 | CG | PHE | 239 | 68.564 | 45.276 | −34.692 | 1.00 | 36.83 | | C |
| ATOM | 1914 | CD1 | PHE | 239 | 67.940 | 46.099 | −33.765 | 1.00 | 36.83 | | C |
| ATOM | 1915 | CD2 | PHE | 239 | 69.906 | 44.953 | −34.506 | 1.00 | 36.83 | | C |
| ATOM | 1916 | CE1 | PHE | 239 | 68.638 | 46.591 | −32.662 | 1.00 | 36.83 | | C |
| ATOM | 1917 | CE2 | PHE | 239 | 70.620 | 45.435 | −33.408 | 1.00 | 36.83 | | C |
| ATOM | 1918 | CZ | PHE | 239 | 69.990 | 46.252 | −32.485 | 1.00 | 36.83 | | C |
| ATOM | 1919 | C | PHE | 239 | 67.727 | 42.571 | −34.592 | 1.00 | 36.83 | | C |
| ATOM | 1920 | O | PHE | 239 | 67.676 | 42.713 | −33.366 | 1.00 | 36.83 | | O |
| ATOM | 1921 | N | GLY | 240 | 68.424 | 41.614 | −35.185 | 1.00 | 36.83 | | N |
| ATOM | 1922 | CA | GLY | 240 | 69.236 | 40.711 | −34.393 | 1.00 | 36.83 | | C |
| ATOM | 1923 | C | GLY | 240 | 70.675 | 41.163 | −34.496 | 1.00 | 36.83 | | C |
| ATOM | 1924 | O | GLY | 240 | 71.033 | 41.847 | −35.445 | 1.00 | 36.83 | | O |
| ATOM | 1925 | N | LYS | 241 | 71.508 | 40.806 | −33.531 | 1.00 | 36.83 | | N |
| ATOM | 1926 | CA | LYS | 241 | 72.894 | 41.223 | −33.599 | 1.00 | 36.83 | | C |
| ATOM | 1927 | CB | LYS | 241 | 73.074 | 42.624 | −32.999 | 1.00 | 36.83 | | C |
| ATOM | 1928 | CG | LYS | 241 | 72.798 | 42.728 | −31.524 | 1.00 | 36.83 | | C |
| ATOM | 1929 | CD | LYS | 241 | 72.990 | 44.145 | −31.022 | 1.00 | 36.83 | | C |
| ATOM | 1930 | CE | LYS | 241 | 72.418 | 44.302 | −29.605 | 1.00 | 36.83 | | C |
| ATOM | 1931 | NZ | LYS | 241 | 72.616 | 45.681 | −29.027 | 1.00 | 36.83 | | N |
| ATOM | 1932 | C | LYS | 241 | 73.865 | 40.276 | −32.937 | 1.00 | 36.83 | | C |
| ATOM | 1933 | O | LYS | 241 | 73.604 | 39.741 | −31.869 | 1.00 | 36.83 | | O |
| ATOM | 1934 | N | PHE | 242 | 74.995 | 40.072 | −33.595 | 1.00 | 36.83 | | N |
| ATOM | 1935 | CA | PHE | 242 | 76.042 | 39.217 | −33.067 | 1.00 | 36.83 | | C |
| ATOM | 1936 | CB | PHE | 242 | 76.597 | 38.317 | −34.160 | 1.00 | 36.83 | | C |
| ATOM | 1937 | CG | PHE | 242 | 77.701 | 37.412 | −33.698 | 1.00 | 36.83 | | C |
| ATOM | 1938 | CD1 | PHE | 242 | 77.465 | 36.447 | −32.719 | 1.00 | 36.83 | | C |
| ATOM | 1939 | CD2 | PHE | 242 | 78.963 | 37.483 | −34.288 | 1.00 | 36.83 | | C |
| ATOM | 1940 | CE1 | PHE | 242 | 78.468 | 35.558 | −32.347 | 1.00 | 36.83 | | C |
| ATOM | 1941 | CE2 | PHE | 242 | 79.970 | 36.606 | −33.924 | 1.00 | 36.83 | | C |
| ATOM | 1942 | CZ | PHE | 242 | 79.726 | 35.636 | −32.955 | 1.00 | 36.83 | | C |
| ATOM | 1943 | C | PHE | 242 | 77.116 | 40.183 | −32.610 | 1.00 | 36.83 | | C |
| ATOM | 1944 | O | PHE | 242 | 77.593 | 40.995 | −33.399 | 1.00 | 36.83 | | O |
| ATOM | 1945 | N | ILE | 243 | 77.473 | 40.133 | −31.333 | 1.00 | 36.83 | | N |
| ATOM | 1946 | CA | ILE | 243 | 78.509 | 41.034 | −30.846 | 1.00 | 36.83 | | C |
| ATOM | 1947 | CB | ILE | 243 | 78.098 | 41.733 | −29.552 | 1.00 | 36.83 | | C |
| ATOM | 1948 | CG2 | ILE | 243 | 79.209 | 42.628 | −29.092 | 1.00 | 36.83 | | C |
| ATOM | 1949 | CG1 | ILE | 243 | 76.827 | 42.550 | −29.768 | 1.00 | 36.83 | | C |
| ATOM | 1950 | CD1 | ILE | 243 | 76.331 | 43.198 | −28.496 | 1.00 | 36.83 | | C |
| ATOM | 1951 | C | ILE | 243 | 79.800 | 40.285 | −30.569 | 1.00 | 36.83 | | C |
| ATOM | 1952 | O | ILE | 243 | 79.784 | 39.233 | −29.939 | 1.00 | 36.83 | | O |
| ATOM | 1953 | N | GLU | 244 | 80.907 | 40.839 | −31.064 | 1.00 | 36.83 | | N |
| ATOM | 1954 | CA | GLU | 244 | 82.243 | 40.281 | −30.861 | 1.00 | 36.83 | | C |
| ATOM | 1955 | CB | GLU | 244 | 83.023 | 40.186 | −32.187 | 1.00 | 36.83 | | C |
| ATOM | 1956 | CG | GLU | 244 | 82.702 | 38.975 | −33.047 | 1.00 | 36.83 | | C |
| ATOM | 1957 | CD | GLU | 244 | 83.697 | 38.767 | −34.186 | 1.00 | 36.83 | | C |
| ATOM | 1958 | OE1 | GLU | 244 | 83.852 | 39.666 | −35.036 | 1.00 | 36.83 | | O |
| ATOM | 1959 | OE2 | GLU | 244 | 84.326 | 37.691 | −34.235 | 1.00 | 36.83 | | O |
| ATOM | 1960 | C | GLU | 244 | 83.031 | 41.174 | −29.907 | 1.00 | 36.83 | | C |
| ATOM | 1961 | O | GLU | 244 | 83.281 | 42.344 | −30.197 | 1.00 | 36.83 | | O |
| ATOM | 1962 | N | ILE | 245 | 83.369 | 40.636 | −28.744 | 1.00 | 36.83 | | N |
| ATOM | 1963 | CA | ILE | 245 | 84.185 | 41.362 | −27.792 | 1.00 | 36.83 | | C |
| ATOM | 1964 | CB | ILE | 245 | 83.835 | 41.009 | −26.339 | 1.00 | 36.83 | | C |
| ATOM | 1965 | CG2 | ILE | 245 | 84.708 | 41.796 | −25.405 | 1.00 | 36.83 | | C |
| ATOM | 1966 | CG1 | ILE | 245 | 82.353 | 41.296 | −26.068 | 1.00 | 36.83 | | C |
| ATOM | 1967 | CD1 | ILE | 245 | 81.975 | 42.752 | −26.160 | 1.00 | 36.83 | | C |
| ATOM | 1968 | C | ILE | 245 | 85.560 | 40.791 | −28.135 | 1.00 | 36.83 | | C |
| ATOM | 1969 | O | ILE | 245 | 85.780 | 39.574 | −28.041 | 1.00 | 36.83 | | O |
| ATOM | 1970 | N | GLN | 246 | 86.470 | 41.662 | −28.562 | 1.00 | 36.83 | | N |
| ATOM | 1971 | CA | GLN | 246 | 87.799 | 41.229 | −28.962 | 1.00 | 36.83 | | C |
| ATOM | 1972 | CB | GLN | 246 | 88.174 | 41.918 | −30.280 | 1.00 | 36.83 | | C |
| ATOM | 1973 | CG | GLN | 246 | 87.235 | 41.588 | −31.420 | 1.00 | 36.83 | | C |
| ATOM | 1974 | CD | GLN | 246 | 87.275 | 42.618 | −32.532 | 1.00 | 36.83 | | C |
| ATOM | 1975 | OE1 | GLN | 246 | 86.682 | 42.421 | −33.598 | 1.00 | 36.83 | | O |
| ATOM | 1976 | NE2 | GLN | 246 | 87.968 | 43.728 | −32.290 | 1.00 | 36.83 | | N |
| ATOM | 1977 | C | GLN | 246 | 88.880 | 41.471 | −27.914 | 1.00 | 36.83 | | C |
| ATOM | 1978 | O | GLN | 246 | 88.979 | 42.554 | −27.338 | 1.00 | 36.83 | | O |
| ATOM | 1979 | N | PHE | 247 | 89.692 | 40.450 | −27.678 | 1.00 | 36.83 | | N |
| ATOM | 1980 | CA | PHE | 247 | 90.766 | 40.556 | −26.708 | 1.00 | 36.83 | | C |
| ATOM | 1981 | CB | PHE | 247 | 90.615 | 39.509 | −25.595 | 1.00 | 36.83 | | C |
| ATOM | 1982 | CG | PHE | 247 | 89.235 | 39.418 | −25.011 | 1.00 | 36.83 | | C |
| ATOM | 1983 | CD1 | PHE | 247 | 88.277 | 38.575 | −25.578 | 1.00 | 36.83 | | C |
| ATOM | 1984 | CD2 | PHE | 247 | 88.888 | 40.165 | −23.895 | 1.00 | 36.83 | | C |
| ATOM | 1985 | CE1 | PHE | 247 | 86.995 | 38.477 | −25.039 | 1.00 | 36.83 | | C |
| ATOM | 1986 | CE2 | PHE | 247 | 87.602 | 40.073 | −23.348 | 1.00 | 36.83 | | C |
| ATOM | 1987 | CZ | PHE | 247 | 86.655 | 39.224 | −23.925 | 1.00 | 36.83 | | C |
| ATOM | 1988 | C | PHE | 247 | 92.115 | 40.331 | −27.375 | 1.00 | 36.83 | | C |
| ATOM | 1989 | O | PHE | 247 | 92.205 | 39.646 | −28.403 | 1.00 | 36.83 | | O |
| ATOM | 1990 | N | ASN | 248 | 93.166 | 40.894 | −26.776 | 1.00 | 36.83 | | N |
| ATOM | 1991 | CA | ASN | 248 | 94.517 | 40.701 | −27.296 | 1.00 | 36.83 | | C |
| ATOM | 1992 | CB | ASN | 248 | 95.436 | 41.878 | −26.924 | 1.00 | 36.83 | | C |
| ATOM | 1993 | CG | ASN | 248 | 95.554 | 42.097 | −25.418 | 1.00 | 36.83 | | C |
| ATOM | 1994 | OD1 | ASN | 248 | 95.658 | 41.146 | −24.642 | 1.00 | 36.83 | | O |
| ATOM | 1995 | ND2 | ASN | 248 | 95.559 | 43.366 | −25.002 | 1.00 | 36.83 | | N |
| ATOM | 1996 | C | ASN | 248 | 95.045 | 39.397 | −26.694 | 1.00 | 36.83 | | C |
| ATOM | 1997 | O | ASN | 248 | 94.352 | 38.740 | −25.916 | 1.00 | 36.83 | | O |
| ATOM | 1998 | N | SER | 249 | 96.272 | 39.026 | −27.051 | 1.00 | 36.83 | | N |
| ATOM | 1999 | CA | SER | 249 | 96.869 | 37.791 | −26.549 | 1.00 | 36.83 | | C |
| ATOM | 2000 | CB | SER | 249 | 98.321 | 37.662 | −27.030 | 1.00 | 36.83 | | C |
| ATOM | 2001 | OG | SER | 249 | 98.434 | 37.889 | −28.428 | 1.00 | 36.83 | | O |
| ATOM | 2002 | C | SER | 249 | 96.849 | 37.699 | −25.031 | 1.00 | 36.83 | | C |
| ATOM | 2003 | O | SER | 249 | 96.725 | 36.608 | −24.477 | 1.00 | 36.83 | | O |
| ATOM | 2004 | N | ALA | 250 | 96.956 | 38.840 | −24.358 | 1.00 | 36.83 | | N |
| ATOM | 2005 | CA | ALA | 250 | 97.003 | 38.850 | −22.901 | 1.00 | 36.83 | | C |
| ATOM | 2006 | CB | ALA | 250 | 97.725 | 40.084 | −22.429 | 1.00 | 36.83 | | C |
| ATOM | 2007 | C | ALA | 250 | 95.667 | 38.731 | −22.174 | 1.00 | 36.83 | | C |
| ATOM | 2008 | O | ALA | 250 | 95.642 | 38.504 | −20.958 | 1.00 | 36.83 | | O |
| ATOM | 2009 | N | GLY | 251 | 94.560 | 38.902 | −22.901 | 1.00 | 36.83 | | N |
| ATOM | 2010 | CA | GLY | 251 | 93.254 | 38.779 | −22.276 | 1.00 | 36.83 | | C |
| ATOM | 2011 | C | GLY | 251 | 92.560 | 40.101 | −22.054 | 1.00 | 36.83 | | C |
| ATOM | 2012 | O | GLY | 251 | 91.461 | 40.132 | −21.511 | 1.00 | 36.83 | | O |
| ATOM | 2013 | N | PHE | 252 | 93.207 | 41.192 | −22.454 | 1.00 | 36.83 | | N |
| ATOM | 2014 | CA | PHE | 252 | 92.620 | 42.519 | −22.312 | 1.00 | 36.83 | | C |
| ATOM | 2015 | CB | PHE | 252 | 93.711 | 43.592 | −22.221 | 1.00 | 36.83 | | C |
| ATOM | 2016 | CG | PHE | 252 | 94.620 | 43.429 | −21.039 | 1.00 | 36.83 | | C |
| ATOM | 2017 | CD1 | PHE | 252 | 94.439 | 44.196 | −19.894 | 1.00 | 36.83 | | C |
| ATOM | 2018 | CD2 | PHE | 252 | 95.644 | 42.483 | −21.061 | 1.00 | 36.83 | | C |
| ATOM | 2019 | CE1 | PHE | 252 | 95.267 | 44.020 | −18.789 | 1.00 | 36.83 | | C |
| ATOM | 2020 | CE2 | PHE | 252 | 96.470 | 42.301 | −19.964 | 1.00 | 36.83 | | C |
| ATOM | 2021 | CZ | PHE | 252 | 96.282 | 43.068 | −18.829 | 1.00 | 36.83 | | C |
| ATOM | 2022 | C | PHE | 252 | 91.748 | 42.787 | −23.529 | 1.00 | 36.83 | | C |
| ATOM | 2023 | O | PHE | 252 | 91.957 | 42.201 | −24.594 | 1.00 | 36.83 | | O |
| ATOM | 2024 | N | ILE | 253 | 90.773 | 43.675 | −23.367 | 1.00 | 36.83 | | N |
| ATOM | 2025 | CA | ILE | 253 | 89.873 | 44.006 | −24.457 | 1.00 | 36.83 | | C |
| ATOM | 2026 | CB | ILE | 253 | 88.538 | 44.586 | −23.930 | 1.00 | 36.83 | | C |
| ATOM | 2027 | CG2 | ILE | 253 | 87.670 | 45.058 | −25.101 | 1.00 | 36.83 | | C |
| ATOM | 2028 | CG1 | ILE | 253 | 87.803 | 43.520 | −23.109 | 1.00 | 36.83 | | C |
| ATOM | 2029 | CD1 | ILE | 253 | 86.541 | 44.021 | −22.446 | 1.00 | 36.83 | | C |
| ATOM | 2030 | C | ILE | 253 | 90.504 | 45.002 | −25.411 | 1.00 | 36.83 | | C |
| ATOM | 2031 | O | ILE | 253 | 90.828 | 46.126 | −25.028 | 1.00 | 36.83 | | O |
| ATOM | 2032 | N | SER | 254 | 90.647 | 44.583 | −26.663 | 1.00 | 36.83 | | N |
| ATOM | 2033 | CA | SER | 254 | 91.244 | 45.411 | −27.697 | 1.00 | 36.83 | | C |
| ATOM | 2034 | CB | SER | 254 | 92.363 | 44.637 | −28.410 | 1.00 | 36.83 | | C |
| ATOM | 2035 | OG | SER | 254 | 91.913 | 43.381 | −28.895 | 1.00 | 36.83 | | O |
| ATOM | 2036 | C | SER | 254 | 90.209 | 45.869 | −28.716 | 1.00 | 36.83 | | C |
| ATOM | 2037 | O | SER | 254 | 90.501 | 46.730 | −29.545 | 1.00 | 36.83 | | O |
| ATOM | 2038 | N | GLY | 255 | 89.009 | 45.288 | −28.659 | 1.00 | 36.83 | | N |
| ATOM | 2039 | CA | GLY | 255 | 87.960 | 45.682 | −29.592 | 1.00 | 36.83 | | C |
| ATOM | 2040 | C | GLY | 255 | 86.578 | 45.038 | −29.460 | 1.00 | 36.83 | | C |
| ATOM | 2041 | O | GLY | 255 | 86.334 | 44.154 | −28.619 | 1.00 | 36.83 | | O |
| ATOM | 2042 | N | ALA | 256 | 85.677 | 45.507 | −30.323 | 1.00 | 36.83 | | N |
| ATOM | 2043 | CA | ALA | 256 | 84.298 | 45.038 | −30.405 | 1.00 | 36.83 | | C |
| ATOM | 2044 | CB | ALA | 256 | 83.436 | 45.733 | −29.364 | 1.00 | 36.83 | | C |
| ATOM | 2045 | C | ALA | 256 | 83.759 | 45.339 | −31.798 | 1.00 | 36.83 | | C |
| ATOM | 2046 | O | ALA | 256 | 83.982 | 46.426 | −32.354 | 1.00 | 36.83 | | O |
| ATOM | 2047 | N | SER | 257 | 83.043 | 44.370 | −32.359 | 1.00 | 36.83 | | N |
| ATOM | 2048 | CA | SER | 257 | 82.446 | 44.516 | −33.673 | 1.00 | 36.83 | | C |
| ATOM | 2049 | CB | SER | 257 | 83.153 | 43.604 | −34.662 | 1.00 | 36.83 | | C |
| ATOM | 2050 | OG | SER | 257 | 82.848 | 43.994 | −35.986 | 1.00 | 36.83 | | O |
| ATOM | 2051 | C | SER | 257 | 80.975 | 44.128 | −33.564 | 1.00 | 36.83 | | C |
| ATOM | 2052 | O | SER | 257 | 80.609 | 43.281 | −32.752 | 1.00 | 36.83 | | O |
| ATOM | 2053 | N | ILE | 258 | 80.128 | 44.753 | −34.367 | 1.00 | 36.83 | | N |
| ATOM | 2054 | CA | ILE | 258 | 78.706 | 44.445 | −34.332 | 1.00 | 36.83 | | C |
| ATOM | 2055 | CB | ILE | 258 | 77.865 | 45.625 | −33.814 | 1.00 | 36.83 | | C |
| ATOM | 2056 | CG2 | ILE | 258 | 76.384 | 45.231 | −33.794 | 1.00 | 36.83 | | C |
| ATOM | 2057 | CG1 | ILE | 258 | 78.310 | 46.038 | −32.420 | 1.00 | 36.83 | | C |
| ATOM | 2058 | CD1 | ILE | 258 | 77.438 | 47.158 | −31.848 | 1.00 | 36.83 | | C |
| ATOM | 2059 | C | ILE | 258 | 78.166 | 44.120 | −35.719 | 1.00 | 36.83 | | C |
| ATOM | 2060 | O | ILE | 258 | 78.346 | 44.894 | −36.656 | 1.00 | 36.83 | | O |
| ATOM | 2061 | N | GLN | 259 | 77.514 | 42.968 | −35.840 | 1.00 | 36.83 | | N |
| ATOM | 2062 | CA | GLN | 259 | 76.883 | 42.562 | −37.093 | 1.00 | 36.83 | | C |
| ATOM | 2063 | CB | GLN | 259 | 77.350 | 41.164 | −37.497 | 1.00 | 36.83 | | C |
| ATOM | 2064 | CG | GLN | 259 | 76.664 | 40.621 | −38.751 | 1.00 | 36.83 | | C |
| ATOM | 2065 | CD | GLN | 259 | 76.888 | 41.480 | −39.991 | 1.00 | 36.83 | | C |
| ATOM | 2066 | OE1 | GLN | 259 | 76.001 | 41.609 | −40.838 | 1.00 | 36.83 | | O |
| ATOM | 2067 | NE2 | GLN | 259 | 78.077 | 42.058 | −40.107 | 1.00 | 36.83 | | N |
| ATOM | 2068 | C | GLN | 259 | 75.358 | 42.574 | −36.871 | 1.00 | 36.83 | | C |
| ATOM | 2069 | O | GLN | 259 | 74.836 | 41.827 | −36.044 | 1.00 | 36.83 | | O |
| ATOM | 2070 | N | SER | 260 | 74.649 | 43.428 | −37.596 | 1.00 | 36.83 | | N |
| ATOM | 2071 | CA | SER | 260 | 73.198 | 43.526 | −37.451 | 1.00 | 36.83 | | C |
| ATOM | 2072 | CB | SER | 260 | 72.732 | 44.959 | −37.676 | 1.00 | 36.83 | | C |
| ATOM | 2073 | OG | SER | 260 | 72.778 | 45.295 | −39.052 | 1.00 | 36.83 | | O |
| ATOM | 2074 | C | SER | 260 | 72.492 | 42.612 | −38.442 | 1.00 | 36.83 | | C |
| ATOM | 2075 | O | SER | 260 | 72.976 | 42.380 | −39.544 | 1.00 | 36.83 | | O |
| ATOM | 2076 | N | TYR | 261 | 71.336 | 42.101 | −38.054 | 1.00 | 36.83 | | N |
| ATOM | 2077 | CA | TYR | 261 | 70.594 | 41.199 | −38.922 | 1.00 | 36.83 | | C |
| ATOM | 2078 | CB | TYR | 261 | 70.710 | 39.762 | −38.409 | 1.00 | 36.83 | | C |
| ATOM | 2079 | CG | TYR | 261 | 72.097 | 39.175 | −38.430 | 1.00 | 36.83 | | C |
| ATOM | 2080 | CD1 | TYR | 261 | 72.682 | 38.745 | −39.619 | 1.00 | 36.83 | | C |
| ATOM | 2081 | CE1 | TYR | 261 | 73.968 | 38.199 | −39.628 | 1.00 | 36.83 | | C |
| ATOM | 2082 | CD2 | TYR | 261 | 72.829 | 39.044 | −37.253 | 1.00 | 36.83 | | C |
| ATOM | 2083 | CE2 | TYR | 261 | 74.113 | 38.501 | −37.253 | 1.00 | 36.83 | | C |
| ATOM | 2084 | CZ | TYR | 261 | 74.672 | 38.085 | −38.436 | 1.00 | 36.83 | | C |
| ATOM | 2085 | OH | TYR | 261 | 75.943 | 37.582 | −38.421 | 1.00 | 36.83 | | O |
| ATOM | 2086 | C | TYR | 261 | 69.108 | 41.512 | −39.039 | 1.00 | 36.83 | | C |
| ATOM | 2087 | O | TYR | 261 | 68.451 | 41.889 | −38.068 | 1.00 | 36.83 | | O |
| ATOM | 2088 | N | LEU | 262 | 68.592 | 41.341 | −40.244 | 1.00 | 36.83 | | N |
| ATOM | 2089 | CA | LEU | 262 | 67.168 | 41.484 | −40.501 | 1.00 | 36.83 | | C |
| ATOM | 2090 | CB | LEU | 262 | 66.496 | 40.147 | −40.156 | 1.00 | 36.83 | | C |
| ATOM | 2091 | CG | LEU | 262 | 65.259 | 39.696 | −40.927 | 1.00 | 36.83 | | C |
| ATOM | 2092 | CD1 | LEU | 262 | 65.663 | 38.658 | −41.979 | 1.00 | 36.83 | | C |
| ATOM | 2093 | CD2 | LEU | 262 | 64.253 | 39.100 | −39.946 | 1.00 | 36.83 | | C |
| ATOM | 2094 | C | LEU | 262 | 66.404 | 42.605 | −39.788 | 1.00 | 36.83 | | C |
| ATOM | 2095 | O | LEU | 262 | 65.498 | 42.338 | −38.994 | 1.00 | 36.83 | | O |
| ATOM | 2096 | N | LEU | 263 | 66.743 | 43.854 | −40.058 | 1.00 | 36.83 | | N |
| ATOM | 2097 | CA | LEU | 263 | 65.991 | 44.925 | −39.428 | 1.00 | 36.83 | | C |
| ATOM | 2098 | CB | LEU | 263 | 66.612 | 46.291 | −39.718 | 1.00 | 36.83 | | C |
| ATOM | 2099 | CG | LEU | 263 | 65.715 | 47.410 | −39.205 | 1.00 | 36.83 | | C |
| ATOM | 2100 | CD1 | LEU | 263 | 65.668 | 47.333 | −37.697 | 1.00 | 36.83 | | C |
| ATOM | 2101 | CD2 | LEU | 263 | 66.232 | 48.766 | −39.668 | 1.00 | 36.83 | | C |
| ATOM | 2102 | C | LEU | 263 | 64.588 | 44.887 | −40.018 | 1.00 | 36.83 | | C |
| ATOM | 2103 | O | LEU | 263 | 64.428 | 44.790 | −41.224 | 1.00 | 36.83 | | O |
| ATOM | 2104 | N | GLU | 264 | 63.573 | 44.955 | −39.167 | 1.00 | 36.83 | | N |
| ATOM | 2105 | CA | GLU | 264 | 62.194 | 44.949 | −39.632 | 1.00 | 36.83 | | C |
| ATOM | 2106 | CB | GLU | 264 | 61.274 | 44.596 | −38.472 | 1.00 | 36.83 | | C |
| ATOM | 2107 | CG | GLU | 264 | 59.791 | 44.555 | −38.808 | 1.00 | 36.83 | | C |
| ATOM | 2108 | CD | GLU | 264 | 58.955 | 44.705 | −37.555 | 1.00 | 36.83 | | C |
| ATOM | 2109 | OE1 | GLU | 264 | 59.221 | 45.668 | −36.819 | 1.00 | 36.83 | | O |
| ATOM | 2110 | OE2 | GLU | 264 | 58.054 | 43.881 | −37.298 | 1.00 | 36.83 | | O |
| ATOM | 2111 | C | GLU | 264 | 61.837 | 46.334 | −40.187 | 1.00 | 36.83 | | C |
| ATOM | 2112 | O | GLU | 264 | 61.182 | 47.123 | −39.520 | 1.00 | 36.83 | | O |
| ATOM | 2113 | N | LYS | 265 | 62.154 | 46.589 | −41.435 | 1.00 | 36.83 | | N |
| ATOM | 2114 | CA | LYS | 265 | 61.975 | 47.895 | −42.034 | 1.00 | 36.83 | | C |
| ATOM | 2115 | CB | LYS | 265 | 62.741 | 47.989 | −43.326 | 1.00 | 36.83 | | C |
| ATOM | 2116 | CG | LYS | 265 | 64.169 | 47.599 | −43.188 | 1.00 | 36.83 | | C |
| ATOM | 2117 | CD | LYS | 265 | 64.965 | 47.987 | −44.361 | 1.00 | 36.83 | | C |
| ATOM | 2118 | CE | LYS | 265 | 64.667 | 47.160 | −45.548 | 1.00 | 36.83 | | C |
| ATOM | 2119 | NZ | LYS | 265 | 65.751 | 47.201 | −46.539 | 1.00 | 36.83 | | N |
| ATOM | 2120 | C | LYS | 265 | 60.537 | 48.333 | −42.235 | 1.00 | 36.83 | | C |
| ATOM | 2121 | O | LYS | 265 | 60.240 | 49.492 | −42.216 | 1.00 | 36.83 | | O |
| ATOM | 2122 | N | SER | 266 | 59.645 | 47.383 | −42.410 | 1.00 | 36.83 | | N |
| ATOM | 2123 | CA | SER | 266 | 58.239 | 47.686 | −42.642 | 1.00 | 36.83 | | C |
| ATOM | 2124 | CB | SER | 266 | 57.476 | 46.419 | −43.010 | 1.00 | 36.83 | | C |
| ATOM | 2125 | OG | SER | 266 | 57.610 | 45.448 | −41.992 | 1.00 | 36.83 | | O |
| ATOM | 2126 | C | SER | 266 | 57.569 | 48.352 | −41.439 | 1.00 | 36.83 | | C |
| ATOM | 2127 | O | SER | 266 | 56.508 | 48.950 | −41.584 | 1.00 | 36.83 | | O |
| ATOM | 2128 | N | ARG | 267 | 58.180 | 48.251 | −40.259 | 1.00 | 36.83 | | N |
| ATOM | 2129 | CA | ARG | 267 | 57.609 | 48.868 | −39.063 | 1.00 | 36.83 | | C |
| ATOM | 2130 | CB | ARG | 267 | 58.393 | 48.459 | −37.807 | 1.00 | 36.83 | | C |
| ATOM | 2131 | CG | ARG | 267 | 57.916 | 49.149 | −36.514 | 1.00 | 36.83 | | C |
| ATOM | 2132 | CD | ARG | 267 | 58.488 | 48.517 | −35.259 | 1.00 | 36.83 | | C |
| ATOM | 2133 | NE | ARG | 267 | 58.051 | 47.131 | −35.082 | 1.00 | 36.83 | | N |
| ATOM | 2134 | CZ | ARG | 267 | 56.839 | 46.762 | −34.691 | 1.00 | 36.83 | | C |
| ATOM | 2135 | NH1 | ARG | 267 | 55.919 | 47.678 | −34.420 | 1.00 | 36.83 | | N |
| ATOM | 2136 | NH2 | ARG | 267 | 56.541 | 45.476 | −34.582 | 1.00 | 36.83 | | N |
| ATOM | 2137 | C | ARG | 267 | 57.579 | 50.396 | −39.172 | 1.00 | 36.83 | | C |
| ATOM | 2138 | O | ARG | 267 | 56.759 | 51.054 | −38.538 | 1.00 | 36.83 | | O |
| ATOM | 2139 | N | VAL | 268 | 58.468 | 50.952 | −39.986 | 1.00 | 36.83 | | N |
| ATOM | 2140 | CA | VAL | 268 | 58.532 | 52.400 | −40.157 | 1.00 | 36.83 | | C |
| ATOM | 2141 | CB | VAL | 268 | 59.759 | 52.806 | −41.019 | 1.00 | 36.83 | | C |
| ATOM | 2142 | CG1 | VAL | 268 | 59.835 | 54.314 | −41.133 | 1.00 | 36.83 | | C |
| ATOM | 2143 | CG2 | VAL | 268 | 61.038 | 52.243 | −40.402 | 1.00 | 36.83 | | C |
| ATOM | 2144 | C | VAL | 268 | 57.267 | 52.979 | −40.800 | 1.00 | 36.83 | | C |
| ATOM | 2145 | O | VAL | 268 | 56.842 | 54.071 | −40.453 | 1.00 | 36.83 | | O |
| ATOM | 2146 | N | VAL | 269 | 56.656 | 52.228 | −41.712 | 1.00 | 36.83 | | N |
| ATOM | 2147 | CA | VAL | 269 | 55.472 | 52.691 | −42.426 | 1.00 | 36.83 | | C |
| ATOM | 2148 | CB | VAL | 269 | 55.608 | 52.426 | −43.961 | 1.00 | 36.83 | | C |
| ATOM | 2149 | CG1 | VAL | 269 | 56.849 | 53.114 | −44.506 | 1.00 | 36.83 | | C |
| ATOM | 2150 | CG2 | VAL | 269 | 55.680 | 50.924 | −44.236 | 1.00 | 36.83 | | C |
| ATOM | 2151 | C | VAL | 269 | 54.166 | 52.063 | −41.946 | 1.00 | 36.83 | | C |
| ATOM | 2152 | O | VAL | 269 | 53.094 | 52.385 | −42.462 | 1.00 | 36.83 | | O |
| ATOM | 2153 | N | PHE | 270 | 54.255 | 51.172 | −40.966 | 1.00 | 36.83 | | N |
| ATOM | 2154 | CA | PHE | 270 | 53.069 | 50.505 | −40.442 | 1.00 | 36.83 | | C |
| ATOM | 2155 | CB | PHE | 270 | 52.572 | 49.439 | −41.423 | 1.00 | 36.83 | | C |
| ATOM | 2156 | CG | PHE | 270 | 51.416 | 48.629 | −40.893 | 1.00 | 36.83 | | C |
| ATOM | 2157 | CD1 | PHE | 270 | 50.129 | 49.143 | −40.905 | 1.00 | 36.83 | | C |
| ATOM | 2158 | CD2 | PHE | 270 | 51.627 | 47.373 | −40.325 | 1.00 | 36.83 | | C |
| ATOM | 2159 | CE1 | PHE | 270 | 49.069 | 48.428 | −40.361 | 1.00 | 36.83 | | C |
| ATOM | 2160 | CE2 | PHE | 270 | 50.573 | 46.650 | −39.778 | 1.00 | 36.83 | | C |
| ATOM | 2161 | CZ | PHE | 270 | 49.294 | 47.178 | −39.796 | 1.00 | 36.83 | | C |
| ATOM | 2162 | C | PHE | 270 | 53.292 | 49.822 | −39.104 | 1.00 | 36.83 | | C |
| ATOM | 2163 | O | PHE | 270 | 54.355 | 49.240 | −38.860 | 1.00 | 36.83 | | O |
| ATOM | 2164 | N | GLN | 271 | 52.276 | 49.888 | −38.248 | 1.00 | 36.83 | | N |
| ATOM | 2165 | CA | GLN | 271 | 52.316 | 49.229 | −36.946 | 1.00 | 36.83 | | C |
| ATOM | 2166 | CB | GLN | 271 | 52.797 | 50.188 | −35.852 | 1.00 | 36.83 | | C |
| ATOM | 2167 | CG | GLN | 271 | 53.994 | 51.038 | −36.264 | 1.00 | 36.83 | | C |
| ATOM | 2168 | CD | GLN | 271 | 53.583 | 52.297 | −37.010 | 1.00 | 36.83 | | C |
| ATOM | 2169 | OE1 | GLN | 271 | 54.329 | 52.815 | −37.841 | 1.00 | 36.83 | | O |
| ATOM | 2170 | NE2 | GLN | 271 | 52.394 | 52.802 | −36.706 | 1.00 | 36.83 | | N |
| ATOM | 2171 | C | GLN | 271 | 50.903 | 48.758 | −36.641 | 1.00 | 36.83 | | C |
| ATOM | 2172 | O | GLN | 271 | 49.949 | 49.431 | −36.976 | 1.00 | 36.83 | | O |
| ATOM | 2173 | N | SER | 272 | 50.773 | 47.592 | −36.024 | 1.00 | 36.83 | | N |
| ATOM | 2174 | CA | SER | 272 | 49.461 | 47.053 | −35.664 | 1.00 | 36.83 | | C |
| ATOM | 2175 | CB | SER | 272 | 49.573 | 45.565 | −35.300 | 1.00 | 36.83 | | C |
| ATOM | 2176 | OG | SER | 272 | 50.080 | 44.805 | −36.387 | 1.00 | 36.83 | | O |
| ATOM | 2177 | C | SER | 272 | 48.911 | 47.829 | −34.459 | 1.00 | 36.83 | | C |
| ATOM | 2178 | O | SER | 272 | 49.634 | 48.605 | −33.825 | 1.00 | 36.83 | | O |
| ATOM | 2179 | N | GLU | 273 | 47.636 | 47.601 | −34.156 | 1.00 | 36.83 | | N |
| ATOM | 2180 | CA | GLU | 273 | 46.940 | 48.263 | −33.046 | 1.00 | 36.83 | | C |
| ATOM | 2181 | CB | GLU | 273 | 45.532 | 47.665 | −32.908 | 1.00 | 36.83 | | C |
| ATOM | 2182 | CG | GLU | 273 | 44.536 | 48.453 | −32.056 | 1.00 | 36.83 | | C |
| ATOM | 2183 | CD | GLU | 273 | 43.111 | 47.907 | −32.179 | 1.00 | 36.83 | | C |
| ATOM | 2184 | OE1 | GLU | 273 | 42.595 | 47.806 | −33.318 | 1.00 | 36.83 | | O |
| ATOM | 2185 | OE2 | GLU | 273 | 42.496 | 47.577 | −31.142 | 1.00 | 36.83 | | O |
| ATOM | 2186 | C | GLU | 273 | 47.701 | 48.128 | −31.735 | 1.00 | 36.83 | | C |
| ATOM | 2187 | O | GLU | 273 | 48.056 | 47.031 | −31.333 | 1.00 | 36.83 | | O |
| ATOM | 2188 | N | THR | 274 | 47.957 | 49.261 | −31.090 | 1.00 | 36.83 | | N |
| ATOM | 2189 | CA | THR | 274 | 48.671 | 49.343 | −29.812 | 1.00 | 36.83 | | C |
| ATOM | 2190 | CB | THR | 274 | 48.199 | 48.285 | −28.785 | 1.00 | 36.83 | | C |
| ATOM | 2191 | OG1 | THR | 274 | 48.752 | 47.010 | −29.130 | 1.00 | 36.83 | | O |
| ATOM | 2192 | CG2 | THR | 274 | 46.685 | 48.209 | −28.746 | 1.00 | 36.83 | | C |
| ATOM | 2193 | C | THR | 274 | 50.207 | 49.280 | −29.843 | 1.00 | 36.83 | | C |
| ATOM | 2194 | O | THR | 274 | 50.840 | 49.412 | −28.805 | 1.00 | 36.83 | | O |
| ATOM | 2195 | N | GLU | 275 | 50.810 | 49.074 | −31.007 | 1.00 | 36.83 | | N |
| ATOM | 2196 | CA | GLU | 275 | 52.269 | 49.059 | −31.080 | 1.00 | 36.83 | | C |
| ATOM | 2197 | CB | GLU | 275 | 52.742 | 48.028 | −32.113 | 1.00 | 36.83 | | C |
| ATOM | 2198 | CG | GLU | 275 | 52.425 | 46.597 | −31.696 | 1.00 | 36.83 | | C |
| ATOM | 2199 | CD | GLU | 275 | 53.033 | 45.543 | −32.597 | 1.00 | 36.83 | | C |
| ATOM | 2200 | OE1 | GLU | 275 | 52.896 | 44.337 | −32.266 | 1.00 | 36.83 | | O |
| ATOM | 2201 | OE2 | GLU | 275 | 53.640 | 45.917 | −33.628 | 1.00 | 36.83 | | O |
| ATOM | 2202 | C | GLU | 275 | 52.764 | 50.460 | −31.448 | 1.00 | 36.83 | | C |
| ATOM | 2203 | O | GLU | 275 | 51.959 | 51.375 | −31.655 | 1.00 | 36.83 | | O |
| ATOM | 2204 | N | ARG | 276 | 54.083 | 50.626 | −31.511 | 1.00 | 36.83 | | N |
| ATOM | 2205 | CA | ARG | 276 | 54.704 | 51.901 | −31.864 | 1.00 | 36.83 | | C |
| ATOM | 2206 | CB | ARG | 276 | 55.388 | 52.557 | −30.662 | 1.00 | 36.83 | | C |
| ATOM | 2207 | CG | ARG | 276 | 54.469 | 53.023 | −29.538 | 1.00 | 36.83 | | C |
| ATOM | 2208 | CD | ARG | 276 | 55.020 | 54.281 | −28.869 | 1.00 | 36.83 | | C |
| ATOM | 2209 | NE | ARG | 276 | 56.454 | 54.196 | −28.597 | 1.00 | 36.83 | | N |
| ATOM | 2210 | CZ | ARG | 276 | 57.138 | 55.101 | −27.908 | 1.00 | 36.83 | | C |
| ATOM | 2211 | NH1 | ARG | 276 | 56.522 | 56.170 | −27.417 | 1.00 | 36.83 | | N |
| ATOM | 2212 | NH2 | ARG | 276 | 58.437 | 54.941 | −27.694 | 1.00 | 36.83 | | N |
| ATOM | 2213 | C | ARG | 276 | 55.765 | 51.725 | −32.936 | 1.00 | 36.83 | | C |
| ATOM | 2214 | O | ARG | 276 | 56.215 | 50.615 | −33.212 | 1.00 | 36.83 | | O |
| ATOM | 2215 | N | ASN | 277 | 56.154 | 52.842 | −33.537 | 1.00 | 36.83 | | N |
| ATOM | 2216 | CA | ASN | 277 | 57.197 | 52.843 | −34.535 | 1.00 | 36.83 | | C |
| ATOM | 2217 | CB | ASN | 277 | 57.156 | 54.138 | −35.343 | 1.00 | 36.83 | | C |
| ATOM | 2218 | CG | ASN | 277 | 57.803 | 53.999 | −36.707 | 1.00 | 36.83 | | C |
| ATOM | 2219 | OD1 | ASN | 277 | 58.907 | 53.467 | −36.834 | 1.00 | 36.83 | | O |
| ATOM | 2220 | ND2 | ASN | 277 | 57.122 | 54.491 | −37.736 | 1.00 | 36.83 | | N |
| ATOM | 2221 | C | ASN | 277 | 58.475 | 52.783 | −33.689 | 1.00 | 36.83 | | C |
| ATOM | 2222 | O | ASN | 277 | 58.399 | 52.647 | −32.472 | 1.00 | 36.83 | | O |
| ATOM | 2223 | N | TYR | 278 | 59.642 | 52.876 | −34.309 | 1.00 | 36.83 | | N |
| ATOM | 2224 | CA | TYR | 278 | 60.877 | 52.824 | −33.528 | 1.00 | 36.83 | | C |
| ATOM | 2225 | CB | TYR | 278 | 62.083 | 52.795 | −34.478 | 1.00 | 36.83 | | C |
| ATOM | 2226 | CG | TYR | 278 | 62.181 | 51.484 | −35.254 | 1.00 | 36.83 | | C |
| ATOM | 2227 | CD1 | TYR | 278 | 62.576 | 50.301 | −34.622 | 1.00 | 36.83 | | C |
| ATOM | 2228 | CE1 | TYR | 278 | 62.620 | 49.090 | −35.315 | 1.00 | 36.83 | | C |
| ATOM | 2229 | CD2 | TYR | 278 | 61.833 | 51.421 | −36.598 | 1.00 | 36.83 | | C |
| ATOM | 2230 | CE2 | TYR | 278 | 61.867 | 50.234 | −37.298 | 1.00 | 36.83 | | C |
| ATOM | 2231 | CZ | TYR | 278 | 62.262 | 49.067 | −36.657 | 1.00 | 36.83 | | C |
| ATOM | 2232 | OH | TYR | 278 | 62.288 | 47.893 | −37.356 | 1.00 | 36.83 | | O |
| ATOM | 2233 | C | TYR | 278 | 60.984 | 53.977 | −32.498 | 1.00 | 36.83 | | C |
| ATOM | 2234 | O | TYR | 278 | 60.582 | 55.114 | −32.759 | 1.00 | 36.83 | | O |
| ATOM | 2235 | N | HIS | 279 | 61.512 | 53.656 | −31.322 | 1.00 | 36.83 | | N |
| ATOM | 2236 | CA | HIS | 279 | 61.673 | 54.616 | −30.243 | 1.00 | 36.83 | | C |
| ATOM | 2237 | CB | HIS | 279 | 62.631 | 54.082 | −29.190 | 1.00 | 36.83 | | C |
| ATOM | 2238 | CG | HIS | 279 | 62.185 | 52.809 | −28.553 | 1.00 | 36.83 | | C |
| ATOM | 2239 | CD2 | HIS | 279 | 62.885 | 51.723 | −28.148 | 1.00 | 36.83 | | C |
| ATOM | 2240 | ND1 | HIS | 279 | 60.871 | 52.561 | −28.219 | 1.00 | 36.83 | | N |
| ATOM | 2241 | CE1 | HIS | 279 | 60.782 | 51.381 | −27.637 | 1.00 | 36.83 | | C |
| ATOM | 2242 | NE2 | HIS | 279 | 61.989 | 50.853 | −27.580 | 1.00 | 36.83 | | N |
| ATOM | 2243 | C | HIS | 279 | 62.167 | 55.990 | −30.686 | 1.00 | 36.83 | | C |
| ATOM | 2244 | O | HIS | 279 | 61.691 | 57.008 | −30.184 | 1.00 | 36.83 | | O |
| ATOM | 2245 | N | ILE | 280 | 63.100 | 56.019 | −31.636 | 1.00 | 36.83 | | N |
| ATOM | 2246 | CA | ILE | 280 | 63.664 | 57.277 | −32.092 | 1.00 | 36.83 | | C |
| ATOM | 2247 | CB | ILE | 280 | 64.693 | 57.082 | −33.206 | 1.00 | 36.83 | | C |
| ATOM | 2248 | CG2 | ILE | 280 | 64.023 | 56.604 | −34.481 | 1.00 | 36.83 | | C |
| ATOM | 2249 | CG1 | ILE | 280 | 65.445 | 58.403 | −33.425 | 1.00 | 36.83 | | C |
| ATOM | 2250 | CD1 | ILE | 280 | 66.289 | 58.833 | −32.216 | 1.00 | 36.83 | | C |
| ATOM | 2251 | C | ILE | 280 | 62.652 | 58.304 | −32.551 | 1.00 | 36.83 | | C |
| ATOM | 2252 | O | ILE | 280 | 62.676 | 59.441 | −32.089 | 1.00 | 36.83 | | O |
| ATOM | 2253 | N | PHE | 281 | 61.744 | 57.927 | −33.440 | 1.00 | 36.83 | | N |
| ATOM | 2254 | CA | PHE | 281 | 60.768 | 58.899 | −33.893 | 1.00 | 36.83 | | C |
| ATOM | 2255 | CB | PHE | 281 | 59.682 | 58.211 | −34.708 | 1.00 | 36.83 | | C |
| ATOM | 2256 | CG | PHE | 281 | 60.164 | 57.670 | −36.013 | 1.00 | 36.83 | | C |
| ATOM | 2257 | CD1 | PHE | 281 | 60.534 | 58.529 | −37.040 | 1.00 | 36.83 | | C |
| ATOM | 2258 | CD2 | PHE | 281 | 60.286 | 56.299 | −36.207 | 1.00 | 36.83 | | C |
| ATOM | 2259 | CE1 | PHE | 281 | 61.022 | 58.033 | −38.238 | 1.00 | 36.83 | | C |
| ATOM | 2260 | CE2 | PHE | 281 | 60.774 | 55.797 | −37.396 | 1.00 | 36.83 | | C |
| ATOM | 2261 | CZ | PHE | 281 | 61.145 | 56.673 | −38.418 | 1.00 | 36.83 | | C |
| ATOM | 2262 | C | PHE | 281 | 60.149 | 59.653 | −32.705 | 1.00 | 36.83 | | C |
| ATOM | 2263 | O | PHE | 281 | 60.016 | 60.876 | −32.745 | 1.00 | 36.83 | | O |
| ATOM | 2264 | N | TYR | 282 | 59.792 | 58.927 | −31.646 | 1.00 | 36.83 | | N |
| ATOM | 2265 | CA | TYR | 282 | 59.180 | 59.537 | −30.466 | 1.00 | 36.83 | | C |
| ATOM | 2266 | CB | TYR | 282 | 58.494 | 58.464 | −29.621 | 1.00 | 36.83 | | C |
| ATOM | 2267 | CG | TYR | 282 | 57.541 | 57.596 | −30.407 | 1.00 | 36.83 | | C |
| ATOM | 2268 | CD1 | TYR | 282 | 57.947 | 56.364 | −30.918 | 1.00 | 36.83 | | C |
| ATOM | 2269 | CE1 | TYR | 282 | 57.072 | 55.571 | −31.688 | 1.00 | 36.83 | | C |
| ATOM | 2270 | CD2 | TYR | 282 | 56.244 | 58.018 | −30.679 | 1.00 | 36.83 | | C |
| ATOM | 2271 | CE2 | TYR | 282 | 55.369 | 57.237 | −31.449 | 1.00 | 36.83 | | C |
| ATOM | 2272 | CZ | TYR | 282 | 55.792 | 56.017 | −31.949 | 1.00 | 36.83 | | C |
| ATOM | 2273 | OH | TYR | 282 | 54.942 | 55.262 | −32.720 | 1.00 | 36.83 | | O |
| ATOM | 2274 | C | TYR | 282 | 60.170 | 60.331 | −29.603 | 1.00 | 36.83 | | C |
| ATOM | 2275 | O | TYR | 282 | 59.827 | 61.373 | −29.042 | 1.00 | 36.83 | | O |
| ATOM | 2276 | N | GLN | 283 | 61.397 | 59.847 | −29.491 | 1.00 | 36.83 | | N |
| ATOM | 2277 | CA | GLN | 283 | 62.388 | 60.553 | −28.697 | 1.00 | 36.83 | | C |
| ATOM | 2278 | CB | GLN | 283 | 63.675 | 59.744 | −28.592 | 1.00 | 36.83 | | C |
| ATOM | 2279 | CG | GLN | 283 | 63.552 | 58.469 | −27.767 | 1.00 | 36.83 | | C |
| ATOM | 2280 | CD | GLN | 283 | 64.834 | 57.661 | −27.777 | 1.00 | 36.83 | | C |
| ATOM | 2281 | OE1 | GLN | 283 | 65.890 | 58.160 | −28.150 | 1.00 | 36.83 | | O |
| ATOM | 2282 | NE2 | GLN | 283 | 64.746 | 56.409 | −27.357 | 1.00 | 36.83 | | N |
| ATOM | 2283 | C | GLN | 283 | 62.686 | 61.908 | −29.313 | 1.00 | 36.83 | | C |
| ATOM | 2284 | O | GLN | 283 | 62.948 | 62.869 | −28.601 | 1.00 | 36.83 | | O |
| ATOM | 2285 | N | LEU | 284 | 62.639 | 61.986 | −30.640 | 1.00 | 36.83 | | N |
| ATOM | 2286 | CA | LEU | 284 | 62.904 | 63.240 | −31.337 | 1.00 | 36.83 | | C |
| ATOM | 2287 | CB | LEU | 284 | 63.120 | 62.993 | −32.837 | 1.00 | 36.83 | | C |
| ATOM | 2288 | CG | LEU | 284 | 63.306 | 64.235 | −33.737 | 1.00 | 36.83 | | C |
| ATOM | 2289 | CD1 | LEU | 284 | 64.711 | 64.813 | −33.582 | 1.00 | 36.83 | | C |
| ATOM | 2290 | CD2 | LEU | 284 | 63.073 | 63.849 | −35.185 | 1.00 | 36.83 | | C |
| ATOM | 2291 | C | LEU | 284 | 61.759 | 64.237 | −31.152 | 1.00 | 36.83 | | C |
| ATOM | 2292 | O | LEU | 284 | 61.977 | 65.368 | −30.720 | 1.00 | 36.83 | | O |
| ATOM | 2293 | N | LEU | 285 | 60.540 | 63.820 | −31.479 | 1.00 | 36.83 | | N |
| ATOM | 2294 | CA | LEU | 285 | 59.398 | 64.713 | −31.367 | 1.00 | 36.83 | | C |
| ATOM | 2295 | CB | LEU | 285 | 58.111 | 64.011 | −31.815 | 1.00 | 36.83 | | C |
| ATOM | 2296 | CG | LEU | 285 | 58.092 | 63.568 | −33.283 | 1.00 | 36.83 | | C |
| ATOM | 2297 | CD1 | LEU | 285 | 56.724 | 63.044 | −33.633 | 1.00 | 36.83 | | C |
| ATOM | 2298 | CD2 | LEU | 285 | 58.459 | 64.735 | −34.188 | 1.00 | 36.83 | | C |
| ATOM | 2299 | C | LEU | 285 | 59.229 | 65.260 | −29.965 | 1.00 | 36.83 | | C |
| ATOM | 2300 | O | LEU | 285 | 58.937 | 66.444 | −29.795 | 1.00 | 36.83 | | O |
| ATOM | 2301 | N | ALA | 286 | 59.433 | 64.398 | −28.972 | 1.00 | 36.83 | | N |
| ATOM | 2302 | CA | ALA | 286 | 59.308 | 64.742 | −27.554 | 1.00 | 36.83 | | C |
| ATOM | 2303 | CB | ALA | 286 | 58.971 | 63.474 | −26.753 | 1.00 | 36.83 | | C |
| ATOM | 2304 | C | ALA | 286 | 60.516 | 65.427 | −26.900 | 1.00 | 36.83 | | C |
| ATOM | 2305 | O | ALA | 286 | 60.355 | 66.319 | −26.078 | 1.00 | 36.83 | | O |
| ATOM | 2306 | N | GLY | 287 | 61.721 | 64.993 | −27.240 | 1.00 | 36.83 | | N |
| ATOM | 2307 | CA | GLY | 287 | 62.903 | 65.561 | −26.617 | 1.00 | 36.83 | | C |
| ATOM | 2308 | C | GLY | 287 | 63.714 | 66.527 | −27.452 | 1.00 | 36.83 | | C |
| ATOM | 2309 | O | GLY | 287 | 64.901 | 66.730 | −27.182 | 1.00 | 36.83 | | O |
| ATOM | 2310 | N | ALA | 288 | 63.092 | 67.148 | −28.445 | 1.00 | 36.83 | | N |
| ATOM | 2311 | CA | ALA | 288 | 63.820 | 68.085 | −29.287 | 1.00 | 36.83 | | C |
| ATOM | 2312 | CB | ALA | 288 | 63.393 | 67.918 | −30.748 | 1.00 | 36.83 | | C |
| ATOM | 2313 | C | ALA | 288 | 63.662 | 69.548 | −28.869 | 1.00 | 36.83 | | C |
| ATOM | 2314 | O | ALA | 288 | 62.552 | 70.003 | −28.571 | 1.00 | 36.83 | | O |
| ATOM | 2315 | N | THR | 289 | 64.781 | 70.272 | −28.862 | 1.00 | 36.83 | | N |
| ATOM | 2316 | CA | THR | 289 | 64.789 | 71.703 | −28.529 | 1.00 | 36.83 | | C |
| ATOM | 2317 | CB | THR | 289 | 66.229 | 72.255 | −28.431 | 1.00 | 36.83 | | C |
| ATOM | 2318 | OG1 | THR | 289 | 66.937 | 71.947 | −29.643 | 1.00 | 36.83 | | O |
| ATOM | 2319 | CG2 | THR | 289 | 66.957 | 71.657 | −27.232 | 1.00 | 36.83 | | C |
| ATOM | 2320 | C | THR | 289 | 64.068 | 72.482 | −29.636 | 1.00 | 36.83 | | C |
| ATOM | 2321 | O | THR | 289 | 64.196 | 72.155 | −30.823 | 1.00 | 36.83 | | O |
| ATOM | 2322 | N | ALA | 290 | 63.343 | 73.527 | −29.250 | 1.00 | 36.83 | | N |
| ATOM | 2323 | CA | ALA | 290 | 62.575 | 74.338 | −30.201 | 1.00 | 36.83 | | C |
| ATOM | 2324 | CB | ALA | 290 | 61.918 | 75.524 | −29.474 | 1.00 | 36.83 | | C |
| ATOM | 2325 | C | ALA | 290 | 63.348 | 74.839 | −31.404 | 1.00 | 36.83 | | C |
| ATOM | 2326 | O | ALA | 290 | 62.764 | 75.118 | −32.457 | 1.00 | 36.83 | | O |
| ATOM | 2327 | N | GLU | 291 | 64.655 | 74.976 | −31.259 | 1.00 | 36.83 | | N |
| ATOM | 2328 | CA | GLU | 291 | 65.477 | 75.454 | −32.371 | 1.00 | 36.83 | | C |
| ATOM | 2329 | CB | GLU | 291 | 66.882 | 75.835 | −31.863 | 1.00 | 36.83 | | C |
| ATOM | 2330 | CG | GLU | 291 | 67.967 | 75.910 | −32.944 | 1.00 | 36.83 | | C |
| ATOM | 2331 | CD | GLU | 291 | 68.514 | 74.525 | −33.318 | 1.00 | 36.83 | | C |
| ATOM | 2332 | OE1 | GLU | 291 | 68.991 | 73.814 | −32.393 | 1.00 | 36.83 | | O |
| ATOM | 2333 | OE2 | GLU | 291 | 68.467 | 74.155 | −34.527 | 1.00 | 36.83 | | O |
| ATOM | 2334 | C | GLU | 291 | 65.546 | 74.346 | −33.417 | 1.00 | 36.83 | | C |
| ATOM | 2335 | O | GLU | 291 | 65.880 | 74.576 | −34.584 | 1.00 | 36.83 | | O |
| ATOM | 2336 | N | GLU | 292 | 65.226 | 73.133 | −32.984 | 1.00 | 36.83 | | N |
| ATOM | 2337 | CA | GLU | 292 | 65.234 | 71.993 | −33.876 | 1.00 | 36.83 | | C |
| ATOM | 2338 | CB | GLU | 292 | 65.797 | 70.777 | −33.134 | 1.00 | 36.83 | | C |
| ATOM | 2339 | CG | GLU | 292 | 67.302 | 70.934 | −32.817 | 1.00 | 36.83 | | C |
| ATOM | 2340 | CD | GLU | 292 | 67.860 | 69.830 | −31.922 | 1.00 | 36.83 | | C |
| ATOM | 2341 | OE1 | GLU | 292 | 67.490 | 69.783 | −30.723 | 1.00 | 36.83 | | O |
| ATOM | 2342 | OE2 | GLU | 292 | 68.676 | 69.011 | −32.422 | 1.00 | 36.83 | | O |
| ATOM | 2343 | C | GLU | 292 | 63.808 | 71.770 | −34.357 | 1.00 | 36.83 | | C |
| ATOM | 2344 | O | GLU | 292 | 63.570 | 71.583 | −35.549 | 1.00 | 36.83 | | O |
| ATOM | 2345 | N | LYS | 293 | 62.852 | 71.828 | −33.438 | 1.00 | 36.83 | | N |
| ATOM | 2346 | CA | LYS | 293 | 61.452 | 71.638 | −33.798 | 1.00 | 36.83 | | C |
| ATOM | 2347 | CB | LYS | 293 | 60.535 | 72.114 | −32.669 | 1.00 | 36.83 | | C |
| ATOM | 2348 | CG | LYS | 293 | 60.592 | 71.303 | −31.379 | 1.00 | 36.83 | | C |
| ATOM | 2349 | CD | LYS | 293 | 59.437 | 71.698 | −30.459 | 1.00 | 36.83 | | C |
| ATOM | 2350 | CE | LYS | 293 | 59.308 | 70.744 | −29.273 | 1.00 | 36.83 | | C |
| ATOM | 2351 | NZ | LYS | 293 | 58.121 | 71.053 | −28.410 | 1.00 | 36.83 | | N |
| ATOM | 2352 | C | LYS | 293 | 61.087 | 72.395 | −35.080 | 1.00 | 36.83 | | C |
| ATOM | 2353 | O | LYS | 293 | 60.699 | 71.791 | −36.076 | 1.00 | 36.83 | | O |
| ATOM | 2354 | N | LYS | 294 | 61.203 | 73.719 | −35.049 | 1.00 | 36.83 | | N |
| ATOM | 2355 | CA | LYS | 294 | 60.879 | 74.532 | −36.216 | 1.00 | 36.83 | | C |
| ATOM | 2356 | CB | LYS | 294 | 60.879 | 76.027 | −35.874 | 1.00 | 36.83 | | C |
| ATOM | 2357 | CG | LYS | 294 | 60.395 | 76.909 | −37.020 | 1.00 | 36.83 | | C |
| ATOM | 2358 | CD | LYS | 294 | 60.809 | 78.382 | −36.846 | 1.00 | 36.83 | | C |
| ATOM | 2359 | CE | LYS | 294 | 59.871 | 79.301 | −37.627 | 1.00 | 36.83 | | C |
| ATOM | 2360 | NZ | LYS | 294 | 59.649 | 78.857 | −39.055 | 1.00 | 36.83 | | N |
| ATOM | 2361 | C | LYS | 294 | 61.859 | 74.319 | −37.361 | 1.00 | 36.83 | | C |
| ATOM | 2362 | O | LYS | 294 | 61.464 | 74.379 | −38.521 | 1.00 | 36.83 | | O |
| ATOM | 2363 | N | ALA | 295 | 63.130 | 74.088 | −37.042 | 1.00 | 36.83 | | N |
| ATOM | 2364 | CA | ALA | 295 | 64.138 | 73.892 | −38.089 | 1.00 | 36.83 | | C |
| ATOM | 2365 | CB | ALA | 295 | 65.531 | 73.794 | −37.472 | 1.00 | 36.83 | | C |
| ATOM | 2366 | C | ALA | 295 | 63.865 | 72.650 | −38.938 | 1.00 | 36.83 | | C |
| ATOM | 2367 | O | ALA | 295 | 64.235 | 72.604 | −40.123 | 1.00 | 36.83 | | O |
| ATOM | 2368 | N | LEU | 296 | 63.225 | 71.651 | −38.323 | 1.00 | 36.83 | | N |
| ATOM | 2369 | CA | LEU | 296 | 62.899 | 70.400 | −39.004 | 1.00 | 36.83 | | C |
| ATOM | 2370 | CB | LEU | 296 | 63.341 | 69.209 | −38.142 | 1.00 | 36.83 | | C |
| ATOM | 2371 | CG | LEU | 296 | 64.832 | 69.031 | −37.823 | 1.00 | 36.83 | | C |
| ATOM | 2372 | CD1 | LEU | 296 | 65.010 | 68.075 | −36.646 | 1.00 | 36.83 | | C |
| ATOM | 2373 | CD2 | LEU | 296 | 65.565 | 68.511 | −39.053 | 1.00 | 36.83 | | C |
| ATOM | 2374 | C | LEU | 296 | 61.397 | 70.296 | −39.310 | 1.00 | 36.83 | | C |
| ATOM | 2375 | O | LEU | 296 | 60.926 | 69.288 | −39.849 | 1.00 | 36.83 | | O |
| ATOM | 2376 | N | HIS | 297 | 60.650 | 71.342 | −38.968 | 1.00 | 36.83 | | N |
| ATOM | 2377 | CA | HIS | 297 | 59.206 | 71.382 | −39.204 | 1.00 | 36.83 | | C |
| ATOM | 2378 | CB | HIS | 297 | 58.903 | 71.218 | −40.692 | 1.00 | 36.83 | | C |
| ATOM | 2379 | CG | HIS | 297 | 59.484 | 72.297 | −41.553 | 1.00 | 36.83 | | C |
| ATOM | 2380 | CD2 | HIS | 297 | 58.893 | 73.178 | −42.391 | 1.00 | 36.83 | | C |
| ATOM | 2381 | ND1 | HIS | 297 | 60.841 | 72.532 | −41.642 | 1.00 | 36.83 | | N |
| ATOM | 2382 | CE1 | HIS | 297 | 61.059 | 73.509 | −42.503 | 1.00 | 36.83 | | C |
| ATOM | 2383 | NE2 | HIS | 297 | 59.893 | 73.918 | −42.972 | 1.00 | 36.83 | | N |
| ATOM | 2384 | C | HIS | 297 | 58.454 | 70.307 | −38.429 | 1.00 | 36.83 | | C |
| ATOM | 2385 | O | HIS | 297 | 57.389 | 69.847 | −38.852 | 1.00 | 36.83 | | O |
| ATOM | 2386 | N | LEU | 298 | 59.013 | 69.919 | −37.291 | 1.00 | 36.83 | | N |
| ATOM | 2387 | CA | LEU | 298 | 58.422 | 68.891 | −36.441 | 1.00 | 36.83 | | C |
| ATOM | 2388 | CB | LEU | 298 | 59.506 | 68.312 | −35.529 | 1.00 | 36.83 | | C |
| ATOM | 2389 | CG | LEU | 298 | 60.638 | 67.690 | −36.356 | 1.00 | 36.83 | | C |
| ATOM | 2390 | CD1 | LEU | 298 | 61.755 | 67.155 | −35.465 | 1.00 | 36.83 | | C |
| ATOM | 2391 | CD2 | LEU | 298 | 60.053 | 66.579 | −37.197 | 1.00 | 36.83 | | C |
| ATOM | 2392 | C | LEU | 298 | 57.243 | 69.379 | −35.607 | 1.00 | 36.83 | | C |
| ATOM | 2393 | O | LEU | 298 | 57.079 | 70.572 | −35.370 | 1.00 | 36.83 | | O |
| ATOM | 2394 | N | ALA | 299 | 56.410 | 68.443 | −35.178 | 1.00 | 36.83 | | N |
| ATOM | 2395 | CA | ALA | 299 | 55.251 | 68.761 | −34.363 | 1.00 | 36.83 | | C |
| ATOM | 2396 | CB | ALA | 299 | 54.070 | 69.101 | −35.246 | 1.00 | 36.83 | | C |
| ATOM | 2397 | C | ALA | 299 | 54.950 | 67.526 | −33.522 | 1.00 | 36.83 | | C |
| ATOM | 2398 | O | ALA | 299 | 55.788 | 66.634 | −33.408 | 1.00 | 36.83 | | O |
| ATOM | 2399 | N | GLY | 300 | 53.751 | 67.470 | −32.946 | 1.00 | 36.83 | | N |
| ATOM | 2400 | CA | GLY | 300 | 53.399 | 66.328 | −32.128 | 1.00 | 36.83 | | C |
| ATOM | 2401 | C | GLY | 300 | 53.343 | 65.067 | −32.964 | 1.00 | 36.83 | | C |
| ATOM | 2402 | O | GLY | 300 | 53.075 | 65.121 | −34.161 | 1.00 | 36.83 | | O |
| ATOM | 2403 | N | PRO | 301 | 53.597 | 63.906 | −32.362 | 1.00 | 36.83 | | N |
| ATOM | 2404 | CD | PRO | 301 | 53.965 | 63.630 | −30.961 | 1.00 | 36.83 | | C |
| ATOM | 2405 | CA | PRO | 301 | 53.545 | 62.679 | −33.147 | 1.00 | 36.83 | | C |
| ATOM | 2406 | CB | PRO | 301 | 53.951 | 61.606 | −32.133 | 1.00 | 36.83 | | C |
| ATOM | 2407 | CG | PRO | 301 | 53.536 | 62.204 | −30.801 | 1.00 | 36.83 | | C |
| ATOM | 2408 | C | PRO | 301 | 52.169 | 62.445 | −33.756 | 1.00 | 36.83 | | C |
| ATOM | 2409 | O | PRO | 301 | 52.052 | 61.795 | −34.795 | 1.00 | 36.83 | | O |
| ATOM | 2410 | N | GUL | 302 | 51.127 | 62.987 | −33.132 | 1.00 | 36.83 | | N |
| ATOM | 2411 | CA | GLU | 302 | 49.761 | 62.811 | −33.648 | 1.00 | 36.83 | | C |
| ATOM | 2412 | CB | GLU | 302 | 48.735 | 63.389 | −32.670 | 1.00 | 36.83 | | C |
| ATOM | 2413 | CG | GLU | 302 | 49.133 | 64.722 | −32.024 | 1.00 | 36.83 | | C |
| ATOM | 2414 | CD | GLU | 302 | 50.092 | 64.538 | −30.846 | 1.00 | 36.83 | | C |
| ATOM | 2415 | OE1 | GLU | 302 | 49.788 | 63.715 | −29.955 | 1.00 | 36.83 | | O |
| ATOM | 2416 | OE2 | GLU | 302 | 51.144 | 65.213 | −30.801 | 1.00 | 36.83 | | O |
| ATOM | 2417 | C | GLU | 302 | 49.517 | 63.421 | −35.029 | 1.00 | 36.83 | | C |
| ATOM | 2418 | O | GLU | 302 | 48.506 | 63.124 | −35.689 | 1.00 | 36.83 | | O |
| ATOM | 2419 | N | SER | 303 | 50.430 | 64.275 | −35.475 | 1.00 | 36.83 | | N |
| ATOM | 2420 | CA | SER | 303 | 50.255 | 64.904 | −36.775 | 1.00 | 36.83 | | C |
| ATOM | 2421 | CB | SER | 303 | 50.776 | 66.340 | −36.729 | 1.00 | 36.83 | | C |
| ATOM | 2422 | OG | SER | 303 | 52.108 | 66.354 | −36.249 | 1.00 | 36.83 | | O |
| ATOM | 2423 | C | SER | 303 | 50.945 | 64.142 | −37.903 | 1.00 | 36.83 | | C |
| ATOM | 2424 | O | SER | 303 | 51.078 | 64.659 | −39.010 | 1.00 | 36.83 | | O |
| ATOM | 2425 | N | PHE | 304 | 51.357 | 62.907 | −37.631 | 1.00 | 36.83 | | N |
| ATOM | 2426 | CA | PHE | 304 | 52.051 | 62.093 | −38.635 | 1.00 | 36.83 | | C |
| ATOM | 2427 | CB | PHE | 304 | 53.521 | 61.958 | −38.231 | 1.00 | 36.83 | | C |
| ATOM | 2428 | CG | PHE | 304 | 54.302 | 63.249 | −38.283 | 1.00 | 36.83 | | C |
| ATOM | 2429 | CD1 | PHE | 304 | 54.803 | 63.730 | −39.490 | 1.00 | 36.83 | | C |
| ATOM | 2430 | CD2 | PHE | 304 | 54.584 | 63.954 | −37.118 | 1.00 | 36.83 | | C |
| ATOM | 2431 | CE1 | PHE | 304 | 55.579 | 64.889 | −39.539 | 1.00 | 36.83 | | C |
| ATOM | 2432 | CE2 | PRE | 304 | 55.363 | 65.121 | −37.158 | 1.00 | 36.83 | | C |
| ATOM | 2433 | CZ | PHE | 304 | 55.860 | 65.585 | −38.370 | 1.00 | 36.83 | | C |
| ATOM | 2434 | C | PHE | 304 | 51.426 | 60.692 | −38.812 | 1.00 | 36.83 | | C |
| ATOM | 2435 | O | PHE | 304 | 51.231 | 59.958 | −37.836 | 1.00 | 36.83 | | O |
| ATOM | 2436 | N | ASN | 305 | 51.127 | 60.319 | −40.054 | 1.00 | 36.83 | | N |
| ATOM | 2437 | CA | ASN | 305 | 50.514 | 59.021 | −40.331 | 1.00 | 36.83 | | C |
| ATOM | 2438 | CB | ASN | 305 | 50.248 | 58.847 | −41.831 | 1.00 | 36.83 | | C |
| ATOM | 2439 | CG | ASN | 305 | 49.445 | 59.994 | −42.420 | 1.00 | 36.83 | | C |
| ATOM | 2440 | OD1 | ASN | 305 | 48.394 | 60.386 | −41.879 | 1.00 | 36.83 | | O |
| ATOM | 2441 | ND2 | ASN | 305 | 49.932 | 60.544 | −43.541 | 1.00 | 36.83 | | N |
| ATOM | 2442 | C | ASN | 305 | 51.341 | 57.839 | −39.836 | 1.00 | 36.83 | | C |
| ATOM | 2443 | O | ASN | 305 | 50.784 | 56.823 | −39.426 | 1.00 | 36.83 | | O |
| ATOM | 2444 | N | TYR | 306 | 52.661 | 57.967 | −39.865 | 1.00 | 36.83 | | N |
| ATOM | 2445 | CA | TYR | 306 | 53.528 | 56.879 | −39.432 | 1.00 | 36.83 | | C |
| ATOM | 2446 | CB | TYR | 306 | 54.954 | 57.085 | −39.957 | 1.00 | 36.83 | | C |
| ATOM | 2447 | CG | TYR | 306 | 55.113 | 56.883 | −41.445 | 1.00 | 36.83 | | C |
| ATOM | 2448 | CD1 | TYR | 306 | 54.268 | 56.034 | −42.155 | 1.00 | 36.83 | | C |
| ATOM | 2449 | CE1 | TYR | 306 | 54.461 | 55.803 | −43.510 | 1.00 | 36.83 | | C |
| ATOM | 2450 | CD2 | TYR | 306 | 56.154 | 57.498 | −42.135 | 1.00 | 36.83 | | C |
| ATOM | 2451 | CE2 | TYR | 306 | 56.357 | 57.272 | −43.491 | 1.00 | 36.83 | | C |
| ATOM | 2452 | CZ | TYR | 306 | 55.511 | 56.428 | −44.168 | 1.00 | 36.83 | | C |
| ATOM | 2453 | OH | TYR | 306 | 55.725 | 56.220 | −45.501 | 1.00 | 36.83 | | O |
| ATOM | 2454 | C | TYR | 306 | 53.579 | 56.687 | −37.920 | 1.00 | 36.83 | | C |
| ATOM | 2455 | O | TYR | 306 | 54.147 | 55.704 | −37.439 | 1.00 | 36.83 | | O |
| ATOM | 2456 | N | LEU | 307 | 52.990 | 57.617 | −37.172 | 1.00 | 36.83 | | N |
| ATOM | 2457 | CA | LEU | 307 | 52.981 | 57.530 | −35.708 | 1.00 | 36.83 | | C |
| ATOM | 2458 | CB | LEU | 307 | 53.896 | 58.591 | −35.111 | 1.00 | 36.83 | | C |
| ATOM | 2459 | CG | LEU | 307 | 55.302 | 58.719 | −35.675 | 1.00 | 36.83 | | C |
| ATOM | 2460 | CD1 | LEU | 307 | 55.890 | 60.021 | −35.204 | 1.00 | 36.83 | | C |
| ATOM | 2461 | CD2 | LEU | 307 | 56.153 | 57.532 | −35.235 | 1.00 | 36.83 | | C |
| ATOM | 2462 | C | LEU | 307 | 51.592 | 57.726 | −35.118 | 1.00 | 36.83 | | C |
| ATOM | 2463 | O | LEU | 307 | 51.414 | 57.628 | −33.906 | 1.00 | 36.83 | | O |
| ATOM | 2464 | N | ASN | 308 | 50.603 | 58.000 | −35.958 | 1.00 | 36.83 | | N |
| ATOM | 2465 | CA | ASN | 308 | 49.261 | 58.238 | −35.443 | 1.00 | 36.83 | | C |
| ATOM | 2466 | CB | ASN | 308 | 48.748 | 59.598 | −35.924 | 1.00 | 36.83 | | C |
| ATOM | 2467 | CG | ASN | 308 | 48.186 | 59.546 | −37.335 | 1.00 | 36.83 | | C |
| ATOM | 2468 | OD1 | ASN | 308 | 48.214 | 58.509 | −38.006 | 1.00 | 36.83 | | O |
| ATOM | 2469 | ND2 | ASN | 308 | 47.666 | 60.674 | −37.793 | 1.00 | 36.83 | | N |
| ATOM | 2470 | C | ASN | 308 | 48.250 | 57.176 | −35.836 | 1.00 | 36.83 | | C |
| ATOM | 2471 | O | ASN | 308 | 47.051 | 57.431 | −35.791 | 1.00 | 36.83 | | O |
| ATOM | 2472 | N | GLN | 309 | 48.716 | 55.988 | −36.206 | 1.00 | 36.83 | | N |
| ATOM | 2473 | CA | GLN | 309 | 47.800 | 54.938 | −36.636 | 1.00 | 36.83 | | C |
| ATOM | 2474 | CB | GLN | 309 | 48.331 | 54.294 | −37.920 | 1.00 | 36.83 | | C |
| ATOM | 2475 | CG | GLN | 309 | 48.234 | 55.188 | −39.150 | 1.00 | 36.83 | | C |
| ATOM | 2476 | CD | GLN | 309 | 46.873 | 55.080 | −39.844 | 1.00 | 36.83 | | C |
| ATOM | 2477 | OE1 | GLN | 309 | 46.565 | 54.063 | −40.484 | 1.00 | 36.83 | | O |
| ATOM | 2478 | NE2 | GLN | 309 | 46.048 | 56.124 | −39.706 | 1.00 | 36.83 | | N |
| ATOM | 2479 | C | GLN | 309 | 47.518 | 53.858 | −35.600 | 1.00 | 36.83 | | C |
| ATOM | 2480 | O | GLN | 309 | 46.398 | 53.397 | −35.478 | 1.00 | 36.83 | | O |
| ATOM | 2481 | N | SER | 310 | 48.537 | 53.455 | −34.857 | 1.00 | 36.83 | | N |
| ATOM | 2482 | CA | SER | 310 | 48.387 | 52.408 | −33.851 | 1.00 | 36.83 | | C |
| ATOM | 2483 | CB | SER | 310 | 49.750 | 52.077 | −33.257 | 1.00 | 36.83 | | C |
| ATOM | 2484 | OG | SER | 310 | 50.281 | 53.164 | −32.526 | 1.00 | 36.83 | | O |
| ATOM | 2485 | C | SER | 310 | 47.414 | 52.752 | −32.722 | 1.00 | 36.83 | | C |
| ATOM | 2486 | O | SER | 310 | 46.718 | 51.878 | −32.206 | 1.00 | 36.83 | | O |
| ATOM | 2487 | N | GLY | 311 | 47.380 | 54.027 | −32.337 | 1.00 | 36.83 | | N |
| ATOM | 2488 | CA | GLY | 311 | 46.494 | 54.443 | −31.271 | 1.00 | 36.83 | | C |
| ATOM | 2489 | C | GLY | 311 | 47.247 | 54.461 | −29.963 | 1.00 | 36.83 | | C |
| ATOM | 2490 | O | GLY | 311 | 46.647 | 54.511 | −28.895 | 1.00 | 36.83 | | O |
| ATOM | 2491 | N | CYS | 312 | 48.571 | 54.420 | −30.064 | 1.00 | 36.83 | | N |
| ATOM | 2492 | CA | CYS | 312 | 49.473 | 54.426 | −28.916 | 1.00 | 36.83 | | C |
| ATOM | 2493 | CB | CYS | 312 | 49.801 | 52.982 | −28.498 | 1.00 | 36.83 | | C |
| ATOM | 2494 | SG | CYS | 312 | 51.259 | 52.830 | −27.427 | 1.00 | 36.83 | | S |
| ATOM | 2495 | C | CYS | 312 | 50.764 | 55.164 | −29.288 | 1.00 | 36.83 | | C |
| ATOM | 2496 | O | CYS | 312 | 51.394 | 54.837 | −30.294 | 1.00 | 36.83 | | O |
| ATOM | 2497 | N | VAL | 313 | 51.148 | 56.150 | −28.475 | 1.00 | 36.83 | | N |
| ATOM | 2498 | CA | VAL | 313 | 52.345 | 56.943 | −28.724 | 1.00 | 36.83 | | C |
| ATOM | 2499 | CB | VAL | 313 | 51.979 | 58.372 | −29.170 | 1.00 | 36.83 | | C |
| ATOM | 2500 | CG1 | VAL | 313 | 51.139 | 58.318 | −30.435 | 1.00 | 36.83 | | C |
| ATOM | 2501 | CG2 | VAL | 313 | 51.233 | 59.101 | −28.049 | 1.00 | 36.83 | | C |
| ATOM | 2502 | C | VAL | 313 | 53.279 | 57.052 | −27.523 | 1.00 | 36.83 | | C |
| ATOM | 2503 | O | VAL | 313 | 54.317 | 57.711 | −27.587 | 1.00 | 36.83 | | O |
| ATOM | 2504 | N | ASP | 314 | 52.917 | 56.397 | −26.429 | 1.00 | 36.83 | | N |
| ATOM | 2505 | CA | ASP | 314 | 53.717 | 56.452 | −25.220 | 1.00 | 36.83 | | C |
| ATOM | 2506 | CB | ASP | 314 | 53.116 | 57.468 | −24.257 | 1.00 | 36.83 | | C |
| ATOM | 2507 | CG | ASP | 314 | 51.633 | 57.244 | −24.056 | 1.00 | 36.83 | | C |
| ATOM | 2508 | OD1 | ASP | 314 | 50.871 | 57.438 | −25.035 | 1.00 | 36.83 | | O |
| ATOM | 2509 | OD2 | ASP | 314 | 51.225 | 56.854 | −22.938 | 1.00 | 36.83 | | O |
| ATOM | 2510 | C | ASP | 314 | 53.741 | 55.090 | −24.555 | 1.00 | 36.83 | | C |
| ATOM | 2511 | O | ASP | 314 | 52.747 | 54.352 | −24.580 | 1.00 | 36.83 | | O |
| ATOM | 2512 | N | ILE | 315 | 54.882 | 54.781 | −23.955 | 1.00 | 36.83 | | N |
| ATOM | 2513 | CA | ILE | 315 | 55.100 | 53.525 | −23.252 | 1.00 | 36.83 | | C |
| ATOM | 2514 | CB | ILE | 315 | 56.488 | 52.926 | −23.606 | 1.00 | 36.83 | | C |
| ATOM | 2515 | CG2 | ILE | 315 | 56.615 | 51.522 | −23.009 | 1.00 | 36.83 | | C |
| ATOM | 2516 | CG1 | ILE | 315 | 56.689 | 52.888 | −25.119 | 1.00 | 36.83 | | C |
| ATOM | 2517 | CD1 | ILE | 315 | 58.058 | 52.384 | −25.524 | 1.00 | 36.83 | | C |
| ATOM | 2518 | C | ILE | 315 | 55.099 | 53.849 | −21.764 | 1.00 | 36.83 | | C |
| ATOM | 2519 | O | ILE | 315 | 55.885 | 54.682 | −21.328 | 1.00 | 36.83 | | O |
| ATOM | 2520 | N | LYS | 316 | 54.241 | 53.202 | −20.977 | 1.00 | 36.83 | | N |
| ATOM | 2521 | CA | LYS | 316 | 54.209 | 53.480 | −19.539 | 1.00 | 36.83 | | C |
| ATOM | 2522 | CB | LYS | 316 | 53.167 | 52.606 | −18.826 | 1.00 | 36.83 | | C |
| ATOM | 2523 | CG | LYS | 316 | 53.143 | 51.130 | −19.197 | 1.00 | 36.83 | | C |
| ATOM | 2524 | CD | LYS | 316 | 52.042 | 50.397 | −18.385 | 1.00 | 36.83 | | C |
| ATOM | 2525 | CE | LYS | 316 | 51.195 | 49.451 | −19.248 | 1.00 | 36.83 | | C |
| ATOM | 2526 | NZ | LYS | 316 | 50.462 | 50.172 | −20.345 | 1.00 | 36.83 | | N |
| ATOM | 2527 | C | LYS | 316 | 55.564 | 53.312 | −18.862 | 1.00 | 36.83 | | C |
| ATOM | 2528 | O | LYS | 316 | 56.279 | 52.344 | −19.125 | 1.00 | 36.83 | | O |
| ATOM | 2529 | N | GLY | 317 | 55.913 | 54.274 | −18.004 | 1.00 | 36.83 | | N |
| ATOM | 2530 | CA | GLY | 317 | 57.175 | 54.235 | −17.277 | 1.00 | 36.83 | | C |
| ATOM | 2531 | C | GLY | 317 | 58.395 | 54.672 | −18.063 | 1.00 | 36.83 | | C |
| ATOM | 2532 | O | GLY | 317 | 59.515 | 54.677 | −17.558 | 1.00 | 36.83 | | O |
| ATOM | 2533 | N | VAL | 318 | 58.186 | 55.035 | −19.314 | 1.00 | 36.83 | | N |
| ATOM | 2534 | CA | VAL | 318 | 59.279 | 55.465 | −20.173 | 1.00 | 36.83 | | C |
| ATOM | 2535 | CB | VAL | 318 | 59.332 | 54.611 | −21.474 | 1.00 | 36.83 | | C |
| ATOM | 2536 | CG1 | VAL | 318 | 60.495 | 55.038 | −22.342 | 1.00 | 36.83 | | C |
| ATOM | 2537 | CG2 | VAL | 318 | 59.449 | 53.129 | −21.118 | 1.00 | 36.83 | | C |
| ATOM | 2538 | C | VAL | 318 | 59.046 | 56.922 | −20.552 | 1.00 | 36.83 | | C |
| ATOM | 2539 | O | VAL | 318 | 57.921 | 57.313 | −20.869 | 1.00 | 36.83 | | O |
| ATOM | 2540 | N | SER | 319 | 60.108 | 57.716 | −20.485 | 1.00 | 36.83 | | N |
| ATOM | 2541 | CA | SER | 319 | 60.043 | 59.124 | −20.857 | 1.00 | 36.83 | | C |
| ATOM | 2542 | CB | SER | 319 | 60.687 | 59.999 | −19.782 | 1.00 | 36.83 | | C |
| ATOM | 2543 | OG | SER | 319 | 61.114 | 61.218 | −20.357 | 1.00 | 36.83 | | O |
| ATOM | 2544 | C | SER | 319 | 60.831 | 59.249 | −22.150 | 1.00 | 36.83 | | C |
| ATOM | 2545 | O | SER | 319 | 62.069 | 59.242 | −22.133 | 1.00 | 36.83 | | O |
| ATOM | 2546 | N | ASP | 320 | 60.120 | 59.352 | −23.267 | 1.00 | 36.83 | | N |
| ATOM | 2547 | CA | ASP | 320 | 60.768 | 59.449 | −24.563 | 1.00 | 36.83 | | C |
| ATOM | 2548 | CB | ASP | 320 | 59.714 | 59.439 | −25.670 | 1.00 | 36.83 | | C |
| ATOM | 2549 | CG | ASP | 320 | 59.071 | 58.070 | −25.838 | 1.00 | 36.83 | | C |
| ATOM | 2550 | OD1 | ASP | 320 | 59.786 | 57.122 | −26.236 | 1.00 | 36.83 | | O |
| ATOM | 2551 | OD2 | ASP | 320 | 57.861 | 57.934 | −25.555 | 1.00 | 36.83 | | O |
| ATOM | 2552 | C | ASP | 320 | 61.670 | 60.668 | −24.674 | 1.00 | 36.83 | | C |
| ATOM | 2553 | O | ASP | 320 | 62.624 | 60.682 | −25.455 | 1.00 | 36.83 | | O |
| ATOM | 2554 | N | SER | 321 | 61.391 | 61.685 | −23.874 | 1.00 | 36.83 | | N |
| ATOM | 2555 | CA | SER | 321 | 62.212 | 62.892 | −23.914 | 1.00 | 36.83 | | C |
| ATOM | 2556 | CB | SER | 321 | 61.448 | 64.076 | −23.336 | 1.00 | 36.83 | | C |
| ATOM | 2557 | OG | SER | 321 | 62.165 | 65.269 | −23.586 | 1.00 | 36.83 | | O |
| ATOM | 2558 | C | SER | 321 | 63.486 | 62.682 | −23.111 | 1.00 | 36.83 | | C |
| ATOM | 2559 | O | SER | 321 | 64.553 | 63.182 | −23.464 | 1.00 | 36.83 | | O |
| ATOM | 2560 | N | GLU | 322 | 63.351 | 61.931 | −22.026 | 1.00 | 36.83 | | N |
| ATOM | 2561 | CA | GLU | 322 | 64.462 | 61.646 | −21.142 | 1.00 | 36.83 | | C |
| ATOM | 2562 | CB | GLU | 322 | 63.917 | 61.147 | −19.791 | 1.00 | 36.83 | | C |
| ATOM | 2563 | CG | GLU | 322 | 64.682 | 61.632 | −18.548 | 1.00 | 36.83 | | C |
| ATOM | 2564 | CD | GLU | 322 | 64.661 | 63.154 | −18.381 | 1.00 | 36.83 | | C |
| ATOM | 2565 | OE1 | GLU | 322 | 63.563 | 63.717 | −18.160 | 1.00 | 36.83 | | O |
| ATOM | 2566 | OE2 | GLU | 322 | 65.744 | 63.787 | −18.472 | 1.00 | 36.83 | | O |
| ATOM | 2567 | C | GLU | 322 | 65.357 | 60.600 | −21.809 | 1.00 | 36.83 | | C |
| ATOM | 2568 | O | GLU | 322 | 66.521 | 60.432 | −21.435 | 1.00 | 36.83 | | O |
| ATOM | 2569 | N | GLU | 323 | 64.809 | 59.901 | −22.800 | 1.00 | 36.83 | | N |
| ATOM | 2570 | CA | GLU | 323 | 65.560 | 58.874 | −23.536 | 1.00 | 36.83 | | C |
| ATOM | 2571 | CB | GLU | 323 | 64.609 | 57.816 | −24.117 | 1.00 | 36.83 | | C |
| ATOM | 2572 | CG | GLU | 323 | 63.797 | 57.014 | −23.097 | 1.00 | 36.83 | | C |
| ATOM | 2573 | CD | GLU | 323 | 64.673 | 56.249 | −22.114 | 1.00 | 36.83 | | C |
| ATOM | 2574 | OE1 | GLU | 323 | 65.742 | 55.757 | −22.537 | 1.00 | 36.83 | | O |
| ATOM | 2575 | OE2 | GLU | 323 | 64.286 | 56.129 | −20.927 | 1.00 | 36.83 | | O |
| ATOM | 2576 | C | GLU | 323 | 66.332 | 59.542 | −24.687 | 1.00 | 36.83 | | C |
| ATOM | 2577 | O | GLU | 323 | 67.449 | 59.143 | −25.020 | 1.00 | 36.83 | | O |
| ATOM | 2578 | N | PHE | 324 | 65.728 | 60.555 | −25.297 | 1.00 | 36.83 | | N |
| ATOM | 2579 | CA | PHE | 324 | 66.390 | 61.261 | −26.387 | 1.00 | 36.83 | | C |
| ATOM | 2580 | CB | PHE | 324 | 65.538 | 62.427 | −26.895 | 1.00 | 36.83 | | C |
| ATOM | 2581 | CG | PHE | 324 | 66.052 | 63.054 | −28.171 | 1.00 | 36.83 | | C |
| ATOM | 2582 | CD1 | PHE | 324 | 66.270 | 62.280 | −29.308 | 1.00 | 36.83 | | C |
| ATOM | 2583 | CD2 | PHE | 324 | 66.268 | 64.430 | −28.251 | 1.00 | 36.83 | | C |
| ATOM | 2584 | CE1 | PHE | 324 | 66.691 | 62.862 | −30.506 | 1.00 | 36.83 | | C |
| ATOM | 2585 | CE2 | PHE | 324 | 66.689 | 65.029 | −29.440 | 1.00 | 36.83 | | C |
| ATOM | 2586 | CZ | PHE | 324 | 66.901 | 64.242 | −30.576 | 1.00 | 36.83 | | C |
| ATOM | 2587 | C | PHE | 324 | 67.719 | 61.787 | −25.869 | 1.00 | 36.83 | | C |
| ATOM | 2588 | O | PHE | 324 | 68.714 | 61.770 | −26.595 | 1.00 | 36.83 | | O |
| ATOM | 2589 | N | LYS | 325 | 67.733 | 62.241 | −24.613 | 1.00 | 36.83 | | N |
| ATOM | 2590 | CA | LYS | 325 | 68.960 | 62.760 | −24.013 | 1.00 | 36.83 | | C |
| ATOM | 2591 | CB | LYS | 325 | 68.702 | 63.284 | −22.593 | 1.00 | 36.83 | | C |
| ATOM | 2592 | CG | LYS | 325 | 67.635 | 64.371 | −22.521 | 1.00 | 36.83 | | C |
| ATOM | 2593 | CD | LYS | 325 | 67.416 | 64.868 | −21.087 | 1.00 | 36.83 | | C |
| ATOM | 2594 | CE | LYS | 325 | 66.436 | 66.032 | −21.022 | 1.00 | 36.83 | | C |
| ATOM | 2595 | NZ | LYS | 325 | 65.057 | 65.697 | −21.497 | 1.00 | 36.83 | | N |
| ATOM | 2596 | C | LYS | 325 | 70.005 | 61.651 | −23.977 | 1.00 | 36.83 | | C |
| ATOM | 2597 | O | LYS | 325 | 71.144 | 61.844 | −24.420 | 1.00 | 36.83 | | O |
| ATOM | 2598 | N | ILE | 326 | 69.620 | 60.485 | −23.460 | 1.00 | 36.83 | | N |
| ATOM | 2599 | CA | ILE | 326 | 70.547 | 59.358 | −23.392 | 1.00 | 36.83 | | C |
| ATOM | 2600 | CB | ILE | 326 | 69.869 | 58.060 | −22.880 | 1.00 | 36.83 | | C |
| ATOM | 2601 | CG2 | ILE | 326 | 70.861 | 56.922 | −22.925 | 1.00 | 36.83 | | C |
| ATOM | 2602 | CG1 | ILE | 326 | 69.359 | 58.239 | −21.450 | 1.00 | 36.83 | | C |
| ATOM | 2603 | CD1 | ILE | 326 | 70.438 | 58.632 | −20.452 | 1.00 | 36.83 | | C |
| ATOM | 2604 | C | ILE | 326 | 71.100 | 59.045 | −24.772 | 1.00 | 36.83 | | C |
| ATOM | 2605 | O | ILE | 326 | 72.295 | 58.799 | −24.931 | 1.00 | 36.83 | | O |
| ATOM | 2606 | N | THR | 327 | 70.228 | 59.047 | −25.774 | 1.00 | 36.83 | | N |
| ATOM | 2607 | CA | THR | 327 | 70.656 | 58.726 | −27.130 | 1.00 | 36.83 | | C |
| ATOM | 2608 | CB | THR | 327 | 69.454 | 58.692 | −28.092 | 1.00 | 36.83 | | C |
| ATOM | 2609 | OG1 | THR | 327 | 68.479 | 57.761 | −27.600 | 1.00 | 36.83 | | O |
| ATOM | 2610 | CG2 | THR | 327 | 69.892 | 58.260 | −29.480 | 1.00 | 36.83 | | C |
| ATOM | 2611 | C | THR | 327 | 71.717 | 59.693 | −27.654 | 1.00 | 36.83 | | C |
| ATOM | 2612 | O | THR | 327 | 72.696 | 59.258 | −28.256 | 1.00 | 36.83 | | O |
| ATOM | 2613 | N | ARG | 328 | 71.536 | 60.991 | −27.405 | 1.00 | 36.83 | | N |
| ATOM | 2614 | CA | ARG | 328 | 72.490 | 62.012 | −27.863 | 1.00 | 36.83 | | C |
| ATOM | 2615 | CB | ARG | 328 | 71.889 | 63.410 | −27.697 | 1.00 | 36.83 | | C |
| ATOM | 2616 | CG | ARG | 328 | 70.519 | 63.564 | −28.347 | 1.00 | 36.83 | | C |
| ATOM | 2617 | CD | ARG | 328 | 69.993 | 65.013 | −28.324 | 1.00 | 36.83 | | C |
| ATOM | 2618 | NE | ARG | 328 | 70.731 | 65.893 | −29.233 | 1.00 | 36.83 | | N |
| ATOM | 2619 | CZ | ARG | 328 | 70.272 | 67.064 | −29.689 | 1.00 | 36.83 | | C |
| ATOM | 2620 | NH1 | ARG | 328 | 69.066 | 67.504 | −29.317 | 1.00 | 36.83 | | N |
| ATOM | 2621 | NH2 | ARG | 328 | 71.017 | 67.791 | −30.530 | 1.00 | 36.83 | | N |
| ATOM | 2622 | C | ARG | 328 | 73.822 | 61.933 | −27.113 | 1.00 | 36.83 | | C |
| ATOM | 2623 | O | ARG | 328 | 74.894 | 62.120 | −27.696 | 1.00 | 36.83 | | O |
| ATOM | 2624 | N | GLN | 329 | 73.756 | 61.649 | −25.815 | 1.00 | 36.83 | | N |
| ATOM | 2625 | CA | GLN | 329 | 74.961 | 61.529 | −25.015 | 1.00 | 36.83 | | C |
| ATOM | 2626 | CB | GLN | 329 | 74.597 | 61.422 | −23.537 | 1.00 | 36.83 | | C |
| ATOM | 2627 | CG | GLN | 329 | 75.722 | 61.830 | −22.619 | 1.00 | 36.83 | | C |
| ATOM | 2628 | CD | GLN | 329 | 75.212 | 62.588 | −21.407 | 1.00 | 36.83 | | C |
| ATOM | 2629 | OE1 | GLN | 329 | 74.343 | 63.467 | −21.528 | 1.00 | 36.83 | | O |
| ATOM | 2630 | NE2 | GLN | 329 | 75.747 | 62.262 | −20.233 | 1.00 | 36.83 | | N |
| ATOM | 2631 | C | GLN | 329 | 75.673 | 60.265 | −25.483 | 1.00 | 36.83 | | C |
| ATOM | 2632 | O | GLN | 329 | 76.912 | 60.162 | −25.453 | 1.00 | 36.83 | | O |
| ATOM | 2633 | N | ALA | 330 | 74.878 | 59.302 | −25.931 | 1.00 | 36.83 | | N |
| ATOM | 2634 | CA | ALA | 330 | 75.433 | 58.054 | −26.432 | 1.00 | 36.83 | | C |
| ATOM | 2635 | CB | ALA | 330 | 74.307 | 57.045 | −26.705 | 1.00 | 36.83 | | C |
| ATOM | 2636 | C | ALA | 330 | 76.181 | 58.384 | −27.721 | 1.00 | 36.83 | | C |
| ATOM | 2637 | O | ALA | 330 | 77.337 | 57.998 | −27.913 | 1.00 | 36.83 | | O |
| ATOM | 2638 | N | MET | 331 | 75.508 | 59.116 | −28.599 | 1.00 | 36.83 | | N |
| ATOM | 2639 | CA | MET | 331 | 76.115 | 59.505 | −29.855 | 1.00 | 36.83 | | C |
| ATOM | 2640 | CB | MET | 331 | 75.104 | 60.284 | −30.686 | 1.00 | 36.83 | | C |
| ATOM | 2641 | CG | MET | 331 | 73.870 | 59.457 | −30.982 | 1.00 | 36.83 | | C |
| ATOM | 2642 | SD | MET | 331 | 72.760 | 60.204 | −32.154 | 1.00 | 36.83 | | S |
| ATOM | 2643 | CE | MET | 331 | 72.865 | 59.068 | −33.498 | 1.00 | 36.83 | | C |
| ATOM | 2644 | C | MET | 331 | 77.397 | 60.320 | −29.634 | 1.00 | 36.83 | | C |
| ATOM | 2645 | O | MET | 331 | 78.333 | 60.209 | −30.418 | 1.00 | 36.83 | | O |
| ATOM | 2646 | N | ASP | 332 | 77.452 | 61.119 | −28.564 | 1.00 | 36.83 | | N |
| ATOM | 2647 | CA | ASP | 332 | 78.659 | 61.912 | −28.275 | 1.00 | 36.83 | | C |
| ATOM | 2648 | CB | ASP | 332 | 78.438 | 62.875 | −27.096 | 1.00 | 36.83 | | C |
| ATOM | 2649 | CG | ASP | 332 | 77.561 | 64.049 | −27.448 | 1.00 | 36.83 | | C |
| ATOM | 2650 | OD1 | ASP | 332 | 77.709 | 64.596 | −28.563 | 1.00 | 36.83 | | O |
| ATOM | 2651 | OD2 | ASP | 332 | 76.730 | 64.442 | −26.597 | 1.00 | 36.83 | | O |
| ATOM | 2652 | C | ASP | 332 | 79.863 | 61.030 | −27.919 | 1.00 | 36.83 | | C |
| ATOM | 2653 | O | ASP | 332 | 80.932 | 61.158 | −28.515 | 1.00 | 36.83 | | O |
| ATOM | 2654 | N | ILE | 333 | 79.698 | 60.151 | −26.935 | 1.00 | 36.83 | | N |
| ATOM | 2655 | CA | ILE | 333 | 80.801 | 59.306 | −26.513 | 1.00 | 36.83 | | C |
| ATOM | 2656 | CB | ILE | 333 | 80.406 | 58.434 | −25.302 | 1.00 | 36.83 | | C |
| ATOM | 2657 | CG2 | ILE | 333 | 81.511 | 57.432 | −24.998 | 1.00 | 36.83 | | C |
| ATOM | 2658 | CG1 | ILE | 333 | 80.194 | 59.326 | −24.076 | 1.00 | 36.83 | | C |
| ATOM | 2659 | CD1 | ILE | 333 | 78.785 | 59.356 | −23.557 | 1.00 | 36.83 | | C |
| ATOM | 2660 | C | ILE | 333 | 81.330 | 58.418 | −27.637 | 1.00 | 36.83 | | C |
| ATOM | 2661 | O | ILE | 333 | 82.539 | 58.153 | −27.723 | 1.00 | 36.83 | | O |
| ATOM | 2662 | N | VAL | 334 | 80.433 | 57.954 | −28.500 | 1.00 | 36.83 | | N |
| ATOM | 2663 | CA | VAL | 334 | 80.861 | 57.113 | −29.601 | 1.00 | 36.83 | | C |
| ATOM | 2664 | CB | VAL | 334 | 79.637 | 56.528 | −30.381 | 1.00 | 36.83 | | C |
| ATOM | 2665 | CG1 | VAL | 334 | 80.088 | 55.915 | −31.704 | 1.00 | 36.83 | | C |
| ATOM | 2666 | CG2 | VAL | 334 | 78.967 | 55.442 | −29.528 | 1.00 | 36.83 | | C |
| ATOM | 2667 | C | VAL | 334 | 81.771 | 57.919 | −30.529 | 1.00 | 36.83 | | C |
| ATOM | 2668 | O | VAL | 334 | 82.854 | 57.465 | −30.890 | 1.00 | 36.83 | | O |
| ATOM | 2669 | N | GLY | 335 | 81.344 | 59.118 | −30.909 | 1.00 | 36.83 | | N |
| ATOM | 2670 | CA | GLY | 335 | 82.187 | 59.923 | −31.772 | 1.00 | 36.83 | | C |
| ATOM | 2671 | C | GLY | 335 | 81.451 | 60.483 | −32.960 | 1.00 | 36.83 | | C |
| ATOM | 2672 | O | GLY | 335 | 82.057 | 60.842 | −33.961 | 1.00 | 36.83 | | O |
| ATOM | 2673 | N | PHE | 336 | 80.130 | 60.535 | −32.864 | 1.00 | 36.83 | | N |
| ATOM | 2674 | CA | PHE | 336 | 79.336 | 61.086 | −33.959 | 1.00 | 36.83 | | C |
| ATOM | 2675 | CB | PHE | 336 | 77.886 | 60.621 | −33.875 | 1.00 | 36.83 | | C |
| ATOM | 2676 | CG | PHE | 336 | 77.672 | 59.226 | −34.370 | 1.00 | 36.83 | | C |
| ATOM | 2677 | CD1 | PHE | 336 | 78.063 | 58.134 | −33.609 | 1.00 | 36.83 | | C |
| ATOM | 2678 | CD2 | PHE | 336 | 77.079 | 59.001 | −35.611 | 1.00 | 36.83 | | C |
| ATOM | 2679 | CE1 | PHE | 336 | 77.858 | 56.828 | −34.081 | 1.00 | 36.83 | | C |
| ATOM | 2680 | CE2 | PHE | 336 | 76.873 | 57.695 | −36.086 | 1.00 | 36.83 | | C |
| ATOM | 2681 | CZ | PHE | 336 | 77.260 | 56.617 | −35.323 | 1.00 | 36.83 | | C |
| ATOM | 2682 | C | PHE | 336 | 79.390 | 62.589 | −33.841 | 1.00 | 36.83 | | C |
| ATOM | 2683 | O | PHE | 336 | 78.973 | 63.146 | −32.825 | 1.00 | 36.83 | | O |
| ATOM | 2684 | N | SER | 337 | 79.909 | 63.235 | −34.879 | 1.00 | 36.83 | | N |
| ATOM | 2685 | CA | SER | 337 | 80.037 | 64.694 | −34.922 | 1.00 | 36.83 | | C |
| ATOM | 2686 | CB | SER | 337 | 80.532 | 65.140 | −36.298 | 1.00 | 36.83 | | C |
| ATOM | 2687 | OG | SER | 337 | 79.497 | 65.015 | −37.268 | 1.00 | 36.83 | | O |
| ATOM | 2688 | C | SER | 337 | 78.699 | 65.362 | −34.654 | 1.00 | 36.83 | | C |
| ATOM | 2689 | O | SER | 337 | 77.677 | 64.690 | −34.496 | 1.00 | 36.83 | | O |
| ATOM | 2690 | N | GLN | 338 | 78.709 | 66.689 | −34.599 | 1.00 | 36.83 | | N |
| ATOM | 2691 | CA | GLN | 338 | 77.487 | 67.452 | −34.366 | 1.00 | 36.83 | | C |
| ATOM | 2692 | CB | GLN | 338 | 77.810 | 68.829 | −33.758 | 1.00 | 36.83 | | C |
| ATOM | 2693 | CG | GLN | 338 | 78.568 | 68.836 | −32.420 | 1.00 | 36.83 | | C |
| ATOM | 2694 | CD | GLN | 338 | 80.093 | 68.722 | −32.564 | 1.00 | 36.83 | | C |
| ATOM | 2695 | OE1 | GLN | 338 | 80.835 | 69.062 | −31.637 | 1.00 | 36.83 | | O |
| ATOM | 2696 | NE2 | GLN | 338 | 80.560 | 68.235 | −33.715 | 1.00 | 36.83 | | N |
| ATOM | 2697 | C | GLN | 338 | 76.845 | 67.664 | −35.738 | 1.00 | 36.83 | | C |
| ATOM | 2698 | O | GLN | 338 | 75.671 | 68.028 | −35.861 | 1.00 | 36.83 | | O |
| ATOM | 2699 | N | GLU | 339 | 77.645 | 67.443 | −36.774 | 1.00 | 36.83 | | N |
| ATOM | 2700 | CA | GLU | 339 | 77.190 | 67.621 | −38.142 | 1.00 | 36.83 | | C |
| ATOM | 2701 | CB | GLU | 339 | 78.397 | 67.952 | −39.038 | 1.00 | 36.83 | | C |
| ATOM | 2702 | CG | GLU | 339 | 78.063 | 68.640 | −40.367 | 1.00 | 36.83 | | C |
| ATOM | 2703 | CD | GLU | 339 | 78.985 | 69.836 | −40.655 | 1.00 | 36.83 | | C |
| ATOM | 2704 | OE1 | GLU | 339 | 78.944 | 70.400 | −41.779 | 1.00 | 36.83 | | O |
| ATOM | 2705 | OE2 | GLU | 339 | 79.749 | 70.215 | −39.740 | 1.00 | 36.83 | | O |
| ATOM | 2706 | C | GLU | 339 | 76.506 | 66.326 | −38.583 | 1.00 | 36.83 | | C |
| ATOM | 2707 | O | GLU | 339 | 75.641 | 66.318 | −39.462 | 1.00 | 36.83 | | O |
| ATOM | 2708 | N | GLU | 340 | 76.896 | 65.230 | −37.956 | 1.00 | 36.83 | | N |
| ATOM | 2709 | CA | GLU | 340 | 76.312 | 63.940 | −38.286 | 1.00 | 36.83 | | C |
| ATOM | 2710 | CB | GLU | 340 | 77.294 | 62.834 | −37.916 | 1.00 | 36.83 | | C |
| ATOM | 2711 | CG | GLU | 340 | 78.328 | 62.653 | −38.991 | 1.00 | 36.83 | | C |
| ATOM | 2712 | CD | GLU | 340 | 79.621 | 62.045 | −38.504 | 1.00 | 36.83 | | C |
| ATOM | 2713 | OE1 | GLU | 340 | 80.410 | 61.611 | −39.360 | 1.00 | 36.83 | | O |
| ATOM | 2714 | OE2 | GLU | 340 | 79.866 | 62.014 | −37.281 | 1.00 | 36.83 | | O |
| ATOM | 2715 | C | GLU | 340 | 74.966 | 63.763 | −37.590 | 1.00 | 36.83 | | C |
| ATOM | 2716 | O | GLU | 340 | 73.947 | 63.533 | −38.244 | 1.00 | 36.83 | | O |
| ATOM | 2717 | N | GLN | 341 | 74.960 | 63.907 | −36.270 | 1.00 | 36.83 | | N |
| ATOM | 2718 | CA | GLN | 341 | 73.729 | 63.772 | −35.507 | 1.00 | 36.83 | | C |
| ATOM | 2719 | CB | GLN | 341 | 73.953 | 64.204 | −34.054 | 1.00 | 36.83 | | C |
| ATOM | 2720 | CG | GLN | 341 | 75.127 | 63.498 | −33.415 | 1.00 | 36.83 | | C |
| ATOM | 2721 | CD | GLN | 341 | 75.323 | 63.838 | −31.950 | 1.00 | 36.83 | | C |
| ATOM | 2722 | OE1 | GLN | 341 | 76.389 | 63.561 | −31.379 | 1.00 | 36.83 | | O |
| ATOM | 2723 | NE2 | GLN | 341 | 74.301 | 64.432 | −31.326 | 1.00 | 36.83 | | N |
| ATOM | 2724 | C | GLN | 341 | 72.649 | 64.622 | −36.160 | 1.00 | 36.83 | | C |
| ATOM | 2725 | O | GLN | 341 | 71.537 | 64.144 | −36.403 | 1.00 | 36.83 | | O |
| ATOM | 2726 | N | MET | 342 | 72.985 | 65.871 | −36.476 | 1.00 | 36.83 | | N |
| ATOM | 2727 | CA | MET | 342 | 72.014 | 66.762 | −37.107 | 1.00 | 36.83 | | C |
| ATOM | 2728 | CB | MET | 342 | 72.661 | 68.104 | −37.463 | 1.00 | 36.83 | | C |
| ATOM | 2729 | CG | MET | 342 | 71.731 | 69.064 | −38.179 | 1.00 | 36.83 | | C |
| ATOM | 2730 | SD | MET | 342 | 70.128 | 69.201 | −37.374 | 1.00 | 36.83 | | S |
| ATOM | 2731 | CE | MET | 342 | 70.616 | 69.963 | −35.783 | 1.00 | 36.83 | | C |
| ATOM | 2732 | C | MET | 342 | 71.436 | 66.135 | −38.356 | 1.00 | 36.83 | | C |
| ATOM | 2733 | O | MET | 342 | 70.238 | 66.217 | −38.590 | 1.00 | 36.83 | | O |
| ATOM | 2734 | N | SER | 343 | 72.288 | 65.509 | −39.162 | 1.00 | 36.83 | | N |
| ATOM | 2735 | CA | SER | 343 | 71.835 | 64.860 | −40.391 | 1.00 | 36.83 | | C |
| ATOM | 2736 | CB | SER | 343 | 73.034 | 64.329 | −41.180 | 1.00 | 36.83 | | C |
| ATOM | 2737 | OG | SER | 343 | 74.061 | 65.296 | −41.300 | 1.00 | 36.83 | | O |
| ATOM | 2738 | C | SER | 343 | 70.915 | 63.688 | −40.022 | 1.00 | 36.83 | | C |
| ATOM | 2739 | O | SER | 343 | 69.845 | 63.492 | −40.617 | 1.00 | 36.83 | | O |
| ATOM | 2740 | N | ILE | 344 | 71.345 | 62.914 | −39.029 | 1.00 | 36.83 | | N |
| ATOM | 2741 | CA | ILE | 344 | 70.574 | 61.772 | −38.561 | 1.00 | 36.83 | | C |
| ATOM | 2742 | CB | ILE | 344 | 71.240 | 61.160 | −37.318 | 1.00 | 36.83 | | C |
| ATOM | 2743 | CG2 | ILE | 344 | 70.362 | 60.039 | −36.751 | 1.00 | 36.83 | | C |
| ATOM | 2744 | CG1 | ILE | 344 | 72.639 | 60.655 | −37.708 | 1.00 | 36.83 | | C |
| ATOM | 2745 | CD1 | ILE | 344 | 73.476 | 60.053 | −36.578 | 1.00 | 36.83 | | C |
| ATOM | 2746 | C | ILE | 344 | 69.144 | 62.215 | −38.235 | 1.00 | 36.83 | | C |
| ATOM | 2747 | O | ILE | 344 | 68.178 | 61.568 | −38.632 | 1.00 | 36.83 | | O |
| ATOM | 2748 | N | PHE | 345 | 69.002 | 63.336 | −37.536 | 1.00 | 36.83 | | N |
| ATOM | 2749 | CA | PHE | 345 | 67.671 | 63.816 | −37.201 | 1.00 | 36.83 | | C |
| ATOM | 2750 | CB | PHE | 345 | 67.740 | 64.804 | −36.031 | 1.00 | 36.83 | | C |
| ATOM | 2751 | CG | PHE | 345 | 68.439 | 64.247 | −34.827 | 1.00 | 36.83 | | C |
| ATOM | 2752 | CD1 | PHE | 345 | 68.447 | 62.874 | −34.587 | 1.00 | 36.83 | | C |
| ATOM | 2753 | CD2 | PHE | 345 | 69.099 | 65.082 | −33.937 | 1.00 | 36.83 | | C |
| ATOM | 2754 | CE1 | PHE | 345 | 69.101 | 62.337 | −33.486 | 1.00 | 36.83 | | C |
| ATOM | 2755 | CE2 | PHE | 345 | 69.760 | 64.557 | −32.822 | 1.00 | 36.83 | | C |
| ATOM | 2756 | CZ | PHE | 345 | 69.761 | 63.177 | −32.597 | 1.00 | 36.83 | | C |
| ATOM | 2757 | C | PHE | 345 | 66.932 | 64.412 | −38.396 | 1.00 | 36.83 | | C |
| ATOM | 2758 | O | PHE | 345 | 65.704 | 64.347 | −38.452 | 1.00 | 36.83 | | O |
| ATOM | 2759 | N | LYS | 346 | 67.662 | 64.977 | −39.357 | 1.00 | 36.83 | | N |
| ATOM | 2760 | CA | LYS | 346 | 67.015 | 65.525 | −40.552 | 1.00 | 36.83 | | C |
| ATOM | 2761 | CB | LYS | 346 | 68.021 | 66.235 | −41.458 | 1.00 | 36.83 | | C |
| ATOM | 2762 | CG | LYS | 346 | 68.595 | 67.541 | −40.913 | 1.00 | 36.83 | | C |
| ATOM | 2763 | CD | LYS | 346 | 69.757 | 68.004 | −41.779 | 1.00 | 36.83 | | C |
| ATOM | 2764 | CE | LYS | 346 | 70.461 | 69.224 | −41.185 | 1.00 | 36.83 | | C |
| ATOM | 2765 | NZ | LYS | 346 | 71.799 | 69.497 | −41.817 | 1.00 | 36.83 | | N |
| ATOM | 2766 | C | LYS | 346 | 66.427 | 64.335 | −41.309 | 1.00 | 36.83 | | C |
| ATOM | 2767 | O | LYS | 346 | 65.339 | 64.418 | −41.886 | 1.00 | 36.83 | | O |
| ATOM | 2768 | N | ILE | 347 | 67.149 | 63.219 | −41.308 | 1.00 | 36.83 | | N |
| ATOM | 2769 | CA | ILE | 347 | 66.650 | 62.041 | −41.991 | 1.00 | 36.83 | | C |
| ATOM | 2770 | CB | ILE | 347 | 67.714 | 60.929 | −42.087 | 1.00 | 36.83 | | C |
| ATOM | 2771 | CG2 | ILE | 347 | 67.066 | 59.643 | −42.586 | 1.00 | 36.83 | | C |
| ATOM | 2772 | CG1 | ILE | 347 | 68.803 | 61.338 | −43.070 | 1.00 | 36.83 | | C |
| ATOM | 2773 | CD1 | ILE | 347 | 70.019 | 60.443 | −43.050 | 1.00 | 36.83 | | C |
| ATOM | 2774 | C | ILE | 347 | 65.416 | 61.506 | −41.281 | 1.00 | 36.83 | | C |
| ATOM | 2775 | O | ILE | 347 | 64.438 | 61.164 | −41.928 | 1.00 | 36.83 | | O |
| ATOM | 2776 | N | ILE | 348 | 65.464 | 61.448 | −39.953 | 1.00 | 36.83 | | N |
| ATOM | 2777 | CA | ILE | 348 | 64.337 | 60.953 | −39.171 | 1.00 | 36.83 | | C |
| ATOM | 2778 | CB | ILE | 348 | 64.643 | 60.968 | −37.658 | 1.00 | 36.83 | | C |
| ATOM | 2779 | CG2 | ILE | 348 | 63.427 | 60.524 | −36.880 | 1.00 | 36.83 | | C |
| ATOM | 2780 | CG1 | ILE | 348 | 65.858 | 60.091 | −37.358 | 1.00 | 36.83 | | C |
| ATOM | 2781 | CD1 | ILE | 348 | 65.715 | 58.627 | −37.735 | 1.00 | 36.83 | | C |
| ATOM | 2782 | C | ILE | 348 | 63.111 | 61.822 | −39.451 | 1.00 | 36.83 | | C |
| ATOM | 2783 | O | ILE | 348 | 62.048 | 61.306 | −39.763 | 1.00 | 36.83 | | O |
| ATOM | 2784 | N | ALA | 349 | 63.261 | 63.140 | −39.354 | 1.00 | 36.83 | | N |
| ATOM | 2785 | CA | ALA | 349 | 62.141 | 64.038 | −39.632 | 1.00 | 36.83 | | C |
| ATOM | 2786 | CB | ALA | 349 | 62.548 | 65.460 | −39.368 | 1.00 | 36.83 | | C |
| ATOM | 2787 | C | ALA | 349 | 61.662 | 63.883 | −41.084 | 1.00 | 36.83 | | C |
| ATOM | 2788 | O | ALA | 349 | 60.448 | 63.860 | −41.357 | 1.00 | 36.83 | | O |
| ATOM | 2789 | N | GLY | 350 | 62.617 | 63.763 | −42.008 | 1.00 | 36.83 | | N |
| ATOM | 2790 | CA | GLY | 350 | 62.279 | 63.608 | −43.417 | 1.00 | 36.83 | | C |
| ATOM | 2791 | C | GLY | 350 | 61.397 | 62.404 | −43.680 | 1.00 | 36.83 | | C |
| ATOM | 2792 | O | GLY | 350 | 60.445 | 62.455 | −44.468 | 1.00 | 36.83 | | O |
| ATOM | 2793 | N | ILE | 351 | 61.724 | 61.304 | −43.018 | 1.00 | 36.83 | | N |
| ATOM | 2794 | CA | ILE | 351 | 60.950 | 60.083 | −43.156 | 1.00 | 36.83 | | C |
| ATOM | 2795 | CB | ILE | 351 | 61.549 | 58.983 | −42.260 | 1.00 | 36.83 | | C |
| ATOM | 2796 | CG2 | ILE | 351 | 60.572 | 57.850 | −42.087 | 1.00 | 36.83 | | C |
| ATOM | 2797 | CG1 | ILE | 351 | 62.888 | 58.532 | −42.860 | 1.00 | 36.83 | | C |
| ATOM | 2798 | CD1 | ILE | 351 | 63.558 | 57.412 | −42.150 | 1.00 | 36.83 | | C |
| ATOM | 2799 | C | ILE | 351 | 59.510 | 60.371 | −42.749 | 1.00 | 36.83 | | C |
| ATOM | 2800 | O | ILE | 351 | 58.557 | 59.956 | −43.424 | 1.00 | 36.83 | | O |
| ATOM | 2801 | N | LEU | 352 | 59.355 | 61.095 | −41.645 | 1.00 | 36.83 | | N |
| ATOM | 2802 | CA | LEU | 352 | 58.035 | 61.431 | −41.143 | 1.00 | 36.83 | | C |
| ATOM | 2803 | CB | LEU | 352 | 58.155 | 62.144 | −39.794 | 1.00 | 36.83 | | C |
| ATOM | 2804 | CG | LEU | 352 | 58.642 | 61.248 | −38.639 | 1.00 | 36.83 | | C |
| ATOM | 2805 | CD1 | LEU | 352 | 58.857 | 62.076 | −37.391 | 1.00 | 36.83 | | C |
| ATOM | 2806 | CD2 | LEU | 352 | 57.628 | 60.173 | −38.365 | 1.00 | 36.83 | | C |
| ATOM | 2807 | C | LEU | 352 | 57.246 | 62.278 | −42.142 | 1.00 | 36.83 | | C |
| ATOM | 2808 | O | LEU | 352 | 56.070 | 62.004 | −42.403 | 1.00 | 36.83 | | O |
| ATOM | 2809 | N | HIS | 353 | 57.886 | 63.289 | −42.720 | 1.00 | 36.83 | | N |
| ATOM | 2810 | CA | HIS | 353 | 57.202 | 64.133 | −43.694 | 1.00 | 36.83 | | C |
| ATOM | 2811 | CB | HIS | 353 | 58.098 | 65.305 | −44.104 | 1.00 | 36.83 | | C |
| ATOM | 2812 | CG | HIS | 353 | 58.373 | 66.263 | −42.987 | 1.00 | 36.83 | | C |
| ATOM | 2813 | CD2 | HIS | 353 | 59.519 | 66.568 | −42.331 | 1.00 | 36.83 | | C |
| ATOM | 2814 | ND1 | HIS | 353 | 57.380 | 67.002 | −42.381 | 1.00 | 36.83 | | N |
| ATOM | 2815 | CE1 | HIS | 353 | 57.900 | 67.719 | −41.401 | 1.00 | 36.83 | | C |
| ATOM | 2816 | NE2 | HIS | 353 | 59.197 | 67.472 | −41.351 | 1.00 | 36.83 | | N |
| ATOM | 2817 | C | HIS | 353 | 56.745 | 63.346 | −44.924 | 1.00 | 36.83 | | C |
| ATOM | 2818 | O | HIS | 353 | 55.627 | 63.541 | −45.403 | 1.00 | 36.83 | | O |
| ATOM | 2819 | N | LEU | 354 | 57.587 | 62.440 | −45.419 | 1.00 | 36.83 | | N |
| ATOM | 2820 | CA | LEU | 354 | 57.216 | 61.658 | −46.590 | 1.00 | 36.83 | | C |
| ATOM | 2821 | CB | LEU | 354 | 58.335 | 60.683 | −46.973 | 1.00 | 36.83 | | C |
| ATOM | 2822 | CG | LEU | 354 | 59.589 | 61.338 | −47.556 | 1.00 | 36.83 | | C |
| ATOM | 2823 | CD1 | LEU | 354 | 60.680 | 60.293 | −47.749 | 1.00 | 36.83 | | C |
| ATOM | 2824 | CD2 | LEU | 354 | 59.237 | 62.032 | −48.867 | 1.00 | 36.83 | | C |
| ATOM | 2825 | C | LEU | 354 | 55.937 | 60.885 | −46.325 | 1.00 | 36.83 | | C |
| ATOM | 2826 | O | LEU | 354 | 55.107 | 60.706 | −47.223 | 1.00 | 36.83 | | O |
| ATOM | 2827 | N | GLY | 355 | 55.789 | 60.431 | −45.084 | 1.00 | 36.83 | | N |
| ATOM | 2828 | CA | GLY | 355 | 54.616 | 59.674 | −44.711 | 1.00 | 36.83 | | C |
| ATOM | 2829 | C | GLY | 355 | 53.328 | 60.472 | −44.794 | 1.00 | 36.83 | | C |
| ATOM | 2830 | O | GLY | 355 | 52.243 | 59.887 | −44.918 | 1.00 | 36.83 | | O |
| ATOM | 2831 | N | ASN | 356 | 53.441 | 61.800 | −44.735 | 1.00 | 36.83 | | N |
| ATOM | 2832 | CA | ASN | 356 | 52.263 | 62.657 | −44.788 | 1.00 | 36.83 | | C |
| ATOM | 2833 | CB | ASN | 356 | 52.478 | 63.924 | −43.937 | 1.00 | 36.83 | | C |
| ATOM | 2834 | CG | ASN | 356 | 52.393 | 63.638 | −42.444 | 1.00 | 36.83 | | C |
| ATOM | 2835 | OD1 | ASN | 356 | 52.444 | 64.546 | −41.614 | 1.00 | 36.83 | | O |
| ATOM | 2836 | ND2 | ASN | 356 | 52.262 | 62.361 | −42.098 | 1.00 | 36.83 | | N |
| ATOM | 2837 | C | ASN | 356 | 51.846 | 63.031 | −46.201 | 1.00 | 36.83 | | C |
| ATOM | 2838 | O | ASN | 356 | 50.727 | 63.500 | −46.410 | 1.00 | 36.83 | | O |
| ATOM | 2839 | N | ILE | 357 | 52.742 | 62.832 | −47.170 | 1.00 | 36.83 | | N |
| ATOM | 2840 | CA | ILE | 357 | 52.419 | 63.128 | −48.564 | 1.00 | 36.83 | | C |
| ATOM | 2841 | CB | ILE | 357 | 53.517 | 62.615 | −49.516 | 1.00 | 36.83 | | C |
| ATOM | 2842 | CG2 | ILE | 357 | 53.021 | 62.688 | −50.966 | 1.00 | 36.83 | | C |
| ATOM | 2843 | CG1 | ILE | 357 | 54.802 | 63.417 | −49.305 | 1.00 | 36.83 | | C |
| ATOM | 2844 | CD1 | ILE | 357 | 55.929 | 62.989 | −50.176 | 1.00 | 36.83 | | C |
| ATOM | 2845 | C | ILE | 357 | 51.117 | 62.398 | −48.881 | 1.00 | 36.83 | | C |
| ATOM | 2846 | O | ILE | 357 | 51.002 | 61.201 | −48.616 | 1.00 | 36.83 | | O |
| ATOM | 2847 | N | LYS | 358 | 50.152 | 63.104 | −49.462 | 1.00 | 36.83 | | N |
| ATOM | 2848 | CA | LYS | 358 | 48.851 | 62.511 | −49.757 | 1.00 | 36.83 | | C |
| ATOM | 2849 | CB | LYS | 358 | 47.771 | 63.271 | −48.964 | 1.00 | 36.83 | | C |
| ATOM | 2850 | CG | LYS | 358 | 46.562 | 62.436 | −48.590 | 1.00 | 36.83 | | C |
| ATOM | 2851 | CD | LYS | 358 | 45.283 | 62.900 | −49.274 | 1.00 | 36.83 | | C |
| ATOM | 2852 | CE | LYS | 358 | 44.719 | 64.175 | −48.667 | 1.00 | 36.83 | | C |
| ATOM | 2853 | NZ | LYS | 358 | 45.468 | 65.431 | −49.032 | 1.00 | 36.83 | | N |
| ATOM | 2854 | C | LYS | 358 | 48.451 | 62.437 | −51.246 | 1.00 | 36.83 | | C |
| ATOM | 2855 | O | LYS | 358 | 47.733 | 63.299 | −51.754 | 1.00 | 36.83 | | O |
| ATOM | 2856 | N | PHE | 359 | 48.899 | 61.396 | −51.941 | 1.00 | 36.83 | | N |
| ATOM | 2857 | CA | PHE | 359 | 48.551 | 61.225 | −53.346 | 1.00 | 36.83 | | C |
| ATOM | 2858 | CB | PHE | 359 | 49.230 | 59.969 | −53.913 | 1.00 | 36.83 | | C |
| ATOM | 2859 | CG | PHE | 359 | 50.708 | 59.905 | −53.664 | 1.00 | 36.83 | | C |
| ATOM | 2860 | CD1 | PHE | 359 | 51.579 | 60.770 | −54.320 | 1.00 | 36.83 | | C |
| ATOM | 2861 | CD2 | PHE | 359 | 51.233 | 58.981 | −52.760 | 1.00 | 36.83 | | C |
| ATOM | 2862 | CE1 | PHE | 359 | 52.942 | 60.721 | −54.081 | 1.00 | 36.83 | | C |
| ATOM | 2863 | CE2 | PHE | 359 | 52.608 | 58.923 | −52.514 | 1.00 | 36.83 | | C |
| ATOM | 2864 | CZ | PHE | 359 | 53.459 | 59.794 | −53.175 | 1.00 | 36.83 | | C |
| ATOM | 2865 | C | PHE | 359 | 47.028 | 61.059 | −53.465 | 1.00 | 36.83 | | C |
| ATOM | 2866 | O | PHE | 359 | 46.354 | 60.744 | −52.492 | 1.00 | 36.83 | | O |
| ATOM | 2867 | N | GLU | 360 | 46.496 | 61.270 | −54.664 | 1.00 | 36.83 | | N |
| ATOM | 2868 | CA | GLU | 360 | 45.071 | 61.112 | −54.925 | 1.00 | 36.83 | | C |
| ATOM | 2869 | CB | GLU | 360 | 44.269 | 62.259 | −54.289 | 1.00 | 36.83 | | C |
| ATOM | 2870 | CG | GLU | 360 | 44.833 | 63.638 | −54.558 | 1.00 | 36.83 | | C |
| ATOM | 2871 | CD | GLU | 360 | 44.812 | 64.526 | −53.323 | 1.00 | 36.83 | | C |
| ATOM | 2872 | OE1 | GLU | 360 | 45.732 | 65.382 | −53.212 | 1.00 | 36.83 | | O |
| ATOM | 2873 | OE2 | GLU | 360 | 43.888 | 64.375 | −52.475 | 1.00 | 36.83 | | O |
| ATOM | 2874 | C | GLU | 360 | 44.871 | 61.072 | −56.432 | 1.00 | 36.83 | | C |
| ATOM | 2875 | O | GLU | 360 | 45.683 | 61.622 | −57.188 | 1.00 | 36.83 | | O |
| ATOM | 2876 | N | LYS | 361 | 43.810 | 60.398 | −56.866 | 1.00 | 36.83 | | N |
| ATOM | 2877 | CA | LYS | 361 | 43.513 | 60.263 | −58.282 | 1.00 | 36.83 | | C |
| ATOM | 2878 | CB | LYS | 361 | 42.250 | 59.423 | −58.471 | 1.00 | 36.83 | | C |
| ATOM | 2879 | CG | LYS | 361 | 42.072 | 58.835 | −59.866 | 1.00 | 36.83 | | C |
| ATOM | 2880 | CD | LYS | 361 | 41.018 | 57.731 | −59.830 | 1.00 | 36.83 | | C |
| ATOM | 2881 | CE | LYS | 361 | 40.850 | 57.064 | −61.185 | 1.00 | 36.83 | | C |
| ATOM | 2882 | NZ | LYS | 361 | 40.401 | 58.049 | −62.232 | 1.00 | 36.83 | | N |
| ATOM | 2883 | C | LYS | 361 | 43.323 | 61.631 | −58.908 | 1.00 | 36.83 | | C |
| ATOM | 2884 | O | LYS | 361 | 42.796 | 62.534 | −58.269 | 1.00 | 36.83 | | O |
| ATOM | 2885 | N | GLY | 362 | 43.760 | 61.788 | −60.153 | 1.00 | 36.83 | | N |
| ATOM | 2886 | CA | GLY | 362 | 43.621 | 63.072 | −60.829 | 1.00 | 36.83 | | C |
| ATOM | 2887 | C | GLY | 362 | 42.649 | 62.935 | −61.979 | 1.00 | 36.83 | | C |
| ATOM | 2888 | O | GLY | 362 | 41.577 | 62.349 | −61.817 | 1.00 | 36.83 | | O |
| ATOM | 2889 | N | ALA | 363 | 43.004 | 63.478 | −63.137 | 1.00 | 36.83 | | N |
| ATOM | 2890 | CA | ALA | 363 | 42.144 | 63.370 | −64.312 | 1.00 | 36.83 | | C |
| ATOM | 2891 | CB | ALA | 363 | 42.750 | 64.130 | −65.475 | 1.00 | 36.83 | | C |
| ATOM | 2892 | C | ALA | 363 | 42.003 | 61.889 | −64.672 | 1.00 | 36.83 | | C |
| ATOM | 2893 | O | ALA | 363 | 40.909 | 61.316 | −64.569 | 1.00 | 36.83 | | O |
| ATOM | 2894 | N | GLY | 364 | 43.111 | 61.272 | −65.091 | 1.00 | 36.83 | | N |
| ATOM | 2895 | CA | GLY | 364 | 43.083 | 59.864 | −65.446 | 1.00 | 36.83 | | C |
| ATOM | 2896 | C | GLY | 364 | 43.278 | 59.000 | −64.219 | 1.00 | 36.83 | | C |
| ATOM | 2897 | O | GLY | 364 | 42.748 | 59.313 | −63.151 | 1.00 | 36.83 | | O |
| ATOM | 2898 | N | GLU | 365 | 44.020 | 57.903 | −64.365 | 1.00 | 36.83 | | N |
| ATOM | 2899 | CA | GLU | 365 | 44.299 | 57.022 | −63.226 | 1.00 | 36.83 | | C |
| ATOM | 2900 | CB | GLU | 365 | 44.480 | 55.563 | −63.667 | 1.00 | 36.83 | | C |
| ATOM | 2901 | CG | GLU | 365 | 45.060 | 54.686 | −62.527 | 1.00 | 36.83 | | C |
| ATOM | 2902 | CD | GLU | 365 | 44.534 | 53.256 | −62.508 | 1.00 | 36.83 | | C |
| ATOM | 2903 | OE1 | GLU | 365 | 44.704 | 52.531 | −63.516 | 1.00 | 36.83 | | O |
| ATOM | 2904 | OE2 | GLU | 365 | 43.958 | 52.855 | −61.468 | 1.00 | 36.83 | | O |
| ATOM | 2905 | C | GLU | 365 | 45.572 | 57.486 | −62.525 | 1.00 | 36.83 | | C |
| ATOM | 2906 | O | GLU | 365 | 45.810 | 57.152 | −61.363 | 1.00 | 36.83 | | O |
| ATOM | 2907 | N | GLY | 366 | 46.391 | 58.256 | −63.239 | 1.00 | 36.83 | | N |
| ATOM | 2908 | CA | GLY | 366 | 47.628 | 58.747 | −62.665 | 1.00 | 36.83 | | C |
| ATOM | 2909 | C | GLY | 366 | 47.343 | 59.584 | −61.438 | 1.00 | 36.83 | | C |
| ATOM | 2910 | O | GLY | 366 | 46.375 | 60.336 | −61.414 | 1.00 | 36.83 | | O |
| ATOM | 2911 | N | ALA | 367 | 48.192 | 59.447 | −60.425 | 1.00 | 36.83 | | N |
| ATOM | 2912 | CA | ALA | 367 | 48.064 | 60.172 | −59.168 | 1.00 | 36.83 | | C |
| ATOM | 2913 | CB | ALA | 367 | 48.785 | 59.408 | −58.074 | 1.00 | 36.83 | | C |
| ATOM | 2914 | C | ALA | 367 | 48.611 | 61.592 | −59.243 | 1.00 | 36.83 | | C |
| ATOM | 2915 | O | ALA | 367 | 49.484 | 61.878 | −60.059 | 1.00 | 36.83 | | O |
| ATOM | 2916 | N | VAL | 368 | 48.082 | 62.482 | −58.396 | 1.00 | 36.83 | | N |
| ATOM | 2917 | CA | VAL | 368 | 48.542 | 63.874 | −58.342 | 1.00 | 36.83 | | C |
| ATOM | 2918 | CB | VAL | 368 | 47.501 | 64.856 | −58.980 | 1.00 | 36.83 | | C |
| ATOM | 2919 | CG1 | VAL | 368 | 46.969 | 64.267 | −60.286 | 1.00 | 36.83 | | C |
| ATOM | 2920 | CG2 | VAL | 368 | 46.356 | 65.163 | −58.009 | 1.00 | 36.83 | | C |
| ATOM | 2921 | C | VAL | 368 | 48.820 | 64.270 | −56.883 | 1.00 | 36.83 | | C |
| ATOM | 2922 | O | VAL | 368 | 48.533 | 63.502 | −55.968 | 1.00 | 36.83 | | O |
| ATOM | 2923 | N | LEU | 369 | 49.381 | 65.455 | −56.667 | 1.00 | 36.83 | | N |
| ATOM | 2924 | CA | LEU | 369 | 49.697 | 65.920 | −55.318 | 1.00 | 36.83 | | C |
| ATOM | 2925 | CB | LEU | 369 | 51.217 | 65.824 | −55.110 | 1.00 | 36.83 | | C |
| ATOM | 2926 | CG | LEU | 369 | 51.805 | 65.909 | −53.693 | 1.00 | 36.83 | | C |
| ATOM | 2927 | CD1 | LEU | 369 | 51.132 | 64.884 | −52.760 | 1.00 | 36.83 | | C |
| ATOM | 2928 | CD2 | LEU | 369 | 53.307 | 65.668 | −53.763 | 1.00 | 36.83 | | C |
| ATOM | 2929 | C | LEU | 369 | 49.201 | 67.368 | −55.117 | 1.00 | 36.83 | | C |
| ATOM | 2930 | O | LEU | 369 | 49.950 | 68.326 | −55.272 | 1.00 | 36.83 | | O |
| ATOM | 2931 | N | LYS | 370 | 47.931 | 67.527 | −54.761 | 1.00 | 36.83 | | N |
| ATOM | 2932 | CA | LYS | 370 | 47.354 | 68.864 | −54.590 | 1.00 | 36.83 | | C |
| ATOM | 2933 | CB | LYS | 370 | 45.890 | 68.751 | −54.159 | 1.00 | 36.83 | | C |
| ATOM | 2934 | CG | LYS | 370 | 44.999 | 68.245 | −55.313 | 1.00 | 36.83 | | C |
| ATOM | 2935 | CD | LYS | 370 | 43.574 | 67.929 | −54.861 | 1.00 | 36.83 | | C |
| ATOM | 2936 | CE | LYS | 370 | 42.762 | 67.261 | −55.976 | 1.00 | 36.83 | | C |
| ATOM | 2937 | NZ | LYS | 370 | 42.262 | 68.234 | −57.010 | 1.00 | 36.83 | | N |
| ATOM | 2938 | C | LYS | 370 | 48.144 | 69.756 | −53.654 | 1.00 | 36.83 | | C |
| ATOM | 2939 | O | LYS | 370 | 48.519 | 70.861 | −54.027 | 1.00 | 36.83 | | O |
| ATOM | 2940 | N | ASP | 371 | 48.401 | 69.295 | −52.439 | 1.00 | 36.83 | | N |
| ATOM | 2941 | CA | ASP | 371 | 49.196 | 70.092 | −51.519 | 1.00 | 36.83 | | C |
| ATOM | 2942 | CB | ASP | 371 | 48.587 | 70.061 | −50.121 | 1.00 | 36.83 | | C |
| ATOM | 2943 | CG | ASP | 371 | 49.536 | 70.581 | −49.079 | 1.00 | 36.83 | | C |
| ATOM | 2944 | OD1 | ASP | 371 | 50.270 | 69.756 | −48.497 | 1.00 | 36.83 | | O |
| ATOM | 2945 | OD2 | ASP | 371 | 49.567 | 71.815 | −48.857 | 1.00 | 36.83 | | O |
| ATOM | 2946 | C | ASP | 371 | 50.643 | 69.578 | −51.495 | 1.00 | 36.83 | | C |
| ATOM | 2947 | O | ASP | 371 | 50.883 | 68.381 | −51.491 | 1.00 | 36.83 | | O |
| ATOM | 2948 | N | LYS | 372 | 51.606 | 70.489 | −51.494 | 1.00 | 36.83 | | N |
| ATOM | 2949 | CA | LYS | 372 | 53.020 | 70.101 | −51.501 | 1.00 | 36.83 | | C |
| ATOM | 2950 | CB | LYS | 372 | 53.795 | 70.935 | −52.538 | 1.00 | 36.83 | | C |
| ATOM | 2951 | CG | LYS | 372 | 53.050 | 71.229 | −53.829 | 1.00 | 36.83 | | C |
| ATOM | 2952 | CD | LYS | 372 | 52.695 | 69.963 | −54.578 | 1.00 | 36.83 | | C |
| ATOM | 2953 | CE | LYS | 372 | 52.351 | 70.268 | −56.025 | 1.00 | 36.83 | | C |
| ATOM | 2954 | NZ | LYS | 372 | 52.033 | 69.040 | −56.799 | 1.00 | 36.83 | | N |
| ATOM | 2955 | C | LYS | 372 | 53.658 | 70.322 | −50.136 | 1.00 | 36.83 | | C |
| ATOM | 2956 | O | LYS | 372 | 54.861 | 70.158 | −49.960 | 1.00 | 36.83 | | O |
| ATOM | 2957 | N | THR | 373 | 52.847 | 70.688 | −49.163 | 1.00 | 36.83 | | N |
| ATOM | 2958 | CA | THR | 373 | 53.373 | 70.978 | −47.850 | 1.00 | 36.83 | | C |
| ATOM | 2959 | CB | THR | 373 | 52.229 | 71.265 | −46.871 | 1.00 | 36.83 | | C |
| ATOM | 2960 | OG1 | THR | 373 | 51.372 | 72.267 | −47.438 | 1.00 | 36.83 | | O |
| ATOM | 2961 | CG2 | THR | 373 | 52.775 | 71.778 | −45.558 | 1.00 | 36.83 | | C |
| ATOM | 2962 | C | THR | 373 | 54.299 | 69.909 | −47.285 | 1.00 | 36.83 | | C |
| ATOM | 2963 | O | THR | 373 | 55.383 | 70.228 | −46.801 | 1.00 | 36.83 | | O |
| ATOM | 2964 | N | ALA | 374 | 53.882 | 68.648 | −47.343 | 1.00 | 36.83 | | N |
| ATOM | 2965 | CA | ALA | 374 | 54.708 | 67.549 | −46.828 | 1.00 | 36.83 | | C |
| ATOM | 2966 | CB | ALA | 374 | 53.889 | 66.276 | −46.731 | 1.00 | 36.83 | | C |
| ATOM | 2967 | C | ALA | 374 | 55.906 | 67.329 | −47.737 | 1.00 | 36.83 | | C |
| ATOM | 2968 | O | ALA | 374 | 57.032 | 67.197 | −47.266 | 1.00 | 36.83 | | O |
| ATOM | 2969 | N | LEU | 375 | 55.660 | 67.315 | −49.044 | 1.00 | 36.83 | | N |
| ATOM | 2970 | CA | LEU | 375 | 56.726 | 67.110 | −50.024 | 1.00 | 36.83 | | C |
| ATOM | 2971 | CB | LEU | 375 | 56.162 | 67.205 | −51.443 | 1.00 | 36.83 | | C |
| ATOM | 2972 | CG | LEU | 375 | 57.179 | 67.129 | −52.591 | 1.00 | 36.83 | | C |
| ATOM | 2973 | CD1 | LEU | 375 | 57.748 | 65.729 | −52.690 | 1.00 | 36.83 | | C |
| ATOM | 2974 | CD2 | LEU | 375 | 56.502 | 67.518 | −53.899 | 1.00 | 36.83 | | C |
| ATOM | 2975 | C | LEU | 375 | 57.849 | 68.131 | −49.838 | 1.00 | 36.83 | | C |
| ATOM | 2976 | O | LEU | 375 | 59.026 | 67.771 | −49.765 | 1.00 | 36.83 | | O |
| ATOM | 2977 | N | ASN | 376 | 57.487 | 69.408 | −49.753 | 1.00 | 36.83 | | N |
| ATOM | 2978 | CA | ASN | 376 | 58.497 | 70.453 | −49.573 | 1.00 | 36.83 | | C |
| ATOM | 2979 | CB | ASN | 376 | 57.870 | 71.845 | −49.673 | 1.00 | 36.83 | | C |
| ATOM | 2980 | CG | ASN | 376 | 57.061 | 72.028 | −50.925 | 1.00 | 36.83 | | C |
| ATOM | 2981 | OD1 | ASN | 376 | 57.432 | 71.553 | −52.000 | 1.00 | 36.83 | | O |
| ATOM | 2982 | ND2 | ASN | 376 | 55.949 | 72.732 | −50.801 | 1.00 | 36.83 | | N |
| ATOM | 2983 | C | ASN | 376 | 59.202 | 70.320 | −48.233 | 1.00 | 36.83 | | C |
| ATOM | 2984 | O | ASN | 376 | 60.405 | 70.558 | −48.134 | 1.00 | 36.83 | | O |
| ATOM | 2985 | N | ALA | 377 | 58.451 | 69.948 | −47.197 | 1.00 | 36.83 | | N |
| ATOM | 2986 | CA | ALA | 377 | 59.043 | 69.776 | −45.873 | 1.00 | 36.83 | | C |
| ATOM | 2987 | CB | ALA | 377 | 57.987 | 69.281 | −44.897 | 1.00 | 36.83 | | C |
| ATOM | 2988 | C | ALA | 377 | 60.193 | 68.767 | −45.963 | 1.00 | 36.83 | | C |
| ATOM | 2989 | O | ALA | 377 | 61.364 | 69.087 | −45.679 | 1.00 | 36.83 | | O |
| ATOM | 2990 | N | ALA | 378 | 59.858 | 67.553 | −46.374 | 1.00 | 36.83 | | N |
| ATOM | 2991 | CA | ALA | 378 | 60.856 | 66.491 | −46.503 | 1.00 | 36.83 | | C |
| ATOM | 2992 | CB | ALA | 378 | 60.199 | 65.215 | −46.989 | 1.00 | 36.83 | | C |
| ATOM | 2993 | C | ALA | 378 | 61.980 | 66.875 | −47.457 | 1.00 | 36.83 | | C |
| ATOM | 2994 | O | ALA | 378 | 63.162 | 66.676 | −47.158 | 1.00 | 36.83 | | O |
| ATOM | 2995 | N | SER | 379 | 61.608 | 67.429 | −48.604 | 1.00 | 36.83 | | N |
| ATOM | 2996 | CA | SER | 379 | 62.590 | 67.820 | −49.600 | 1.00 | 36.83 | | C |
| ATOM | 2997 | CB | SER | 379 | 61.889 | 68.424 | −50.815 | 1.00 | 36.83 | | C |
| ATOM | 2998 | OG | SER | 379 | 60.994 | 67.474 | −51.387 | 1.00 | 36.83 | | O |
| ATOM | 2999 | C | SER | 379 | 63.546 | 68.807 | −48.965 | 1.00 | 36.83 | | C |
| ATOM | 3000 | O | SER | 379 | 64.759 | 68.724 | −49.148 | 1.00 | 36.83 | | O |
| ATOM | 3001 | N | THR | 380 | 62.992 | 69.721 | −48.174 | 1.00 | 36.83 | | N |
| ATOM | 3002 | CA | THR | 380 | 63.819 | 70.703 | −47.495 | 1.00 | 36.83 | | C |
| ATOM | 3003 | CB | THR | 380 | 62.978 | 71.663 | −46.649 | 1.00 | 36.83 | | C |
| ATOM | 3004 | OG1 | THR | 380 | 62.145 | 72.453 | −47.510 | 1.00 | 36.83 | | O |
| ATOM | 3005 | CG2 | THR | 380 | 63.892 | 72.576 | −45.830 | 1.00 | 36.83 | | C |
| ATOM | 3006 | C | THR | 380 | 64.863 | 70.044 | −46.602 | 1.00 | 36.83 | | C |
| ATOM | 3007 | O | THR | 380 | 66.055 | 70.202 | −46.838 | 1.00 | 36.83 | | O |
| ATOM | 3008 | N | VAL | 381 | 64.429 | 69.284 | −45.596 | 1.00 | 36.83 | | N |
| ATOM | 3009 | CA | VAL | 381 | 65.385 | 68.646 | −44.681 | 1.00 | 36.83 | | C |
| ATOM | 3010 | CB | VAL | 381 | 64.673 | 68.006 | −43.448 | 1.00 | 36.83 | | C |
| ATOM | 3011 | CG1 | VAL | 381 | 63.853 | 69.073 | −42.710 | 1.00 | 36.83 | | C |
| ATOM | 3012 | CG2 | VAL | 381 | 63.789 | 66.820 | −43.880 | 1.00 | 36.83 | | C |
| ATOM | 3013 | C | VAL | 381 | 66.316 | 67.610 | −45.311 | 1.00 | 36.83 | | C |
| ATOM | 3014 | O | VAL | 381 | 67.423 | 67.383 | −44.802 | 1.00 | 36.83 | | O |
| ATOM | 3015 | N | PHE | 382 | 65.884 | 66.991 | −46.411 | 1.00 | 36.83 | | N |
| ATOM | 3016 | CA | PHE | 382 | 66.704 | 65.990 | −47.108 | 1.00 | 36.83 | | C |
| ATOM | 3017 | CB | PHE | 382 | 65.837 | 65.065 | −47.970 | 1.00 | 36.83 | | C |
| ATOM | 3018 | CG | PHE | 382 | 65.190 | 63.939 | −47.210 | 1.00 | 36.83 | | C |
| ATOM | 3019 | CD1 | PHE | 382 | 65.932 | 63.158 | −46.326 | 1.00 | 36.83 | | C |
| ATOM | 3020 | CD2 | PHE | 382 | 63.843 | 63.642 | −47.399 | 1.00 | 36.83 | | C |
| ATOM | 3021 | CE1 | PHE | 382 | 65.335 | 62.090 | −45.632 | 1.00 | 36.83 | | C |
| ATOM | 3022 | CE2 | PHE | 382 | 63.235 | 62.571 | −46.711 | 1.00 | 36.83 | | C |
| ATOM | 3023 | CZ | PHE | 382 | 63.982 | 61.801 | −45.831 | 1.00 | 36.83 | | C |
| ATOM | 3024 | C | PHE | 382 | 67.773 | 66.601 | −48.013 | 1.00 | 36.83 | | C |
| ATOM | 3025 | O | PHE | 382 | 68.793 | 65.971 | −48.297 | 1.00 | 36.83 | | O |
| ATOM | 3026 | N | GLY | 383 | 67.545 | 67.820 | −48.487 | 1.00 | 36.83 | | N |
| ATOM | 3027 | CA | GLY | 383 | 68.534 | 68.438 | −49.354 | 1.00 | 36.83 | | C |
| ATOM | 3028 | C | GLY | 383 | 68.410 | 67.971 | −50.791 | 1.00 | 36.83 | | C |
| ATOM | 3029 | O | GLY | 383 | 69.418 | 67.708 | −51.462 | 1.00 | 36.83 | | O |
| ATOM | 3030 | N | VAL | 384 | 67.173 | 67.868 | −51.266 | 1.00 | 36.83 | | N |
| ATOM | 3031 | CA | VAL | 384 | 66.913 | 67.417 | −52.626 | 1.00 | 36.83 | | C |
| ATOM | 3032 | CB | VAL | 384 | 66.472 | 65.918 | −52.649 | 1.00 | 36.83 | | C |
| ATOM | 3033 | CG1 | VAL | 384 | 67.524 | 65.056 | −51.970 | 1.00 | 36.83 | | C |
| ATOM | 3034 | CG2 | VAL | 384 | 65.154 | 65.739 | −51.947 | 1.00 | 36.83 | | C |
| ATOM | 3035 | C | VAL | 384 | 65.824 | 68.277 | −53.253 | 1.00 | 36.83 | | C |
| ATOM | 3036 | O | VAL | 384 | 65.029 | 68.894 | −52.546 | 1.00 | 36.83 | | O |
| ATOM | 3037 | N | ASN | 385 | 65.798 | 68.312 | −54.581 | 1.00 | 36.83 | | N |
| ATOM | 3038 | CA | ASN | 385 | 64.820 | 69.105 | −55.330 | 1.00 | 36.83 | | C |
| ATOM | 3039 | CB | ASN | 385 | 65.279 | 69.239 | −56.789 | 1.00 | 36.83 | | C |
| ATOM | 3040 | CG | ASN | 385 | 64.340 | 70.084 | −57.606 | 1.00 | 36.83 | | C |
| ATOM | 3041 | OD1 | ASN | 385 | 63.141 | 69.798 | −57.682 | 1.00 | 36.83 | | O |
| ATOM | 3042 | ND2 | ASN | 385 | 64.866 | 71.140 | −58.216 | 1.00 | 36.83 | | N |
| ATOM | 3043 | C | ASN | 385 | 63.412 | 68.506 | −55.286 | 1.00 | 36.83 | | C |
| ATOM | 3044 | O | ASN | 385 | 63.166 | 67.420 | −55.807 | 1.00 | 36.83 | | O |
| ATOM | 3045 | N | PRO | 386 | 62.459 | 69.219 | −54.676 | 1.00 | 36.83 | | N |
| ATOM | 3046 | CD | PRO | 386 | 62.546 | 70.587 | −54.137 | 1.00 | 36.83 | | C |
| ATOM | 3047 | CA | PRO | 386 | 61.086 | 68.715 | −54.584 | 1.00 | 36.83 | | C |
| ATOM | 3048 | CB | PRO | 386 | 60.355 | 69.850 | −53.861 | 1.00 | 36.83 | | C |
| ATOM | 3049 | CG | PRO | 386 | 61.120 | 71.062 | −54.284 | 1.00 | 36.83 | | C |
| ATOM | 3050 | C | PRO | 386 | 60.394 | 68.308 | −55.894 | 1.00 | 36.83 | | C |
| ATOM | 3051 | O | PRO | 386 | 59.664 | 67.313 | −55.930 | 1.00 | 36.83 | | O |
| ATOM | 3052 | N | SER | 387 | 60.582 | 69.076 | −56.961 | 1.00 | 36.83 | | N |
| ATOM | 3053 | CA | SER | 387 | 59.935 | 68.724 | −58.214 | 1.00 | 36.83 | | C |
| ATOM | 3054 | CB | SER | 387 | 59.998 | 69.886 | −59.205 | 1.00 | 36.83 | | C |
| ATOM | 3055 | OG | SER | 387 | 59.084 | 70.900 | −58.831 | 1.00 | 36.83 | | O |
| ATOM | 3056 | C | SER | 387 | 60.555 | 67.475 | −58.814 | 1.00 | 36.83 | | C |
| ATOM | 3057 | O | SER | 387 | 59.872 | 66.724 | −59.511 | 1.00 | 36.83 | | O |
| ATOM | 3058 | N | VAL | 388 | 61.842 | 67.247 | −58.539 | 1.00 | 36.83 | | N |
| ATOM | 3059 | CA | VAL | 388 | 62.505 | 66.047 | −59.037 | 1.00 | 36.83 | | C |
| ATOM | 3060 | CB | VAL | 388 | 64.045 | 66.068 | −58.820 | 1.00 | 36.83 | | C |
| ATOM | 3061 | CG1 | VAL | 388 | 64.613 | 64.671 | −59.032 | 1.00 | 36.83 | | C |
| ATOM | 3062 | CG2 | VAL | 388 | 64.716 | 67.022 | −59.793 | 1.00 | 36.83 | | C |
| ATOM | 3063 | C | VAL | 388 | 61.933 | 64.866 | −58.256 | 1.00 | 36.83 | | C |
| ATOM | 3064 | O | VAL | 388 | 61.626 | 63.828 | −58.829 | 1.00 | 36.83 | | O |
| ATOM | 3065 | N | LEU | 389 | 61.790 | 65.047 | −56.944 | 1.00 | 36.83 | | N |
| ATOM | 3066 | CA | LEU | 389 | 61.262 | 64.005 | −56.060 | 1.00 | 36.83 | | C |
| ATOM | 3067 | CB | LEU | 389 | 61.325 | 64.468 | −54.601 | 1.00 | 36.83 | | C |
| ATOM | 3068 | CG | LEU | 389 | 60.677 | 63.562 | −53.541 | 1.00 | 36.83 | | C |
| ATOM | 3069 | CD1 | LEU | 389 | 61.353 | 62.193 | −53.501 | 1.00 | 36.83 | | C |
| ATOM | 3070 | CD2 | LEU | 389 | 60.776 | 64.243 | −52.189 | 1.00 | 36.83 | | C |
| ATOM | 3071 | C | LEU | 389 | 59.825 | 63.646 | −56.408 | 1.00 | 36.83 | | C |
| ATOM | 3072 | O | LEU | 389 | 59.465 | 62.466 | −56.520 | 1.00 | 36.83 | | O |
| ATOM | 3073 | N | GLU | 390 | 59.008 | 64.681 | −56.568 | 1.00 | 36.83 | | N |
| ATOM | 3074 | CA | GLU | 390 | 57.611 | 64.504 | −56.901 | 1.00 | 36.83 | | C |
| ATOM | 3075 | CB | GLU | 390 | 56.959 | 65.861 | −57.141 | 1.00 | 36.83 | | C |
| ATOM | 3076 | CG | GLU | 390 | 55.533 | 65.739 | −57.567 | 1.00 | 36.83 | | C |
| ATOM | 3077 | CD | GLU | 390 | 54.920 | 67.054 | −57.981 | 1.00 | 36.83 | | C |
| ATOM | 3078 | OE1 | GLU | 390 | 53.732 | 67.028 | −58.366 | 1.00 | 36.83 | | O |
| ATOM | 3079 | OE2 | GLU | 390 | 55.615 | 68.101 | −57.925 | 1.00 | 36.83 | | O |
| ATOM | 3080 | C | GLU | 390 | 57.506 | 63.652 | −58.151 | 1.00 | 36.83 | | C |
| ATOM | 3081 | O | GLU | 390 | 56.799 | 62.633 | −58.172 | 1.00 | 36.83 | | O |
| ATOM | 3082 | N | LYS | 391 | 58.237 | 64.065 | −59.182 | 1.00 | 36.83 | | N |
| ATOM | 3083 | CA | LYS | 391 | 58.266 | 63.370 | −60.463 | 1.00 | 36.83 | | C |
| ATOM | 3084 | CB | LYS | 391 | 59.271 | 64.050 | −61.395 | 1.00 | 36.83 | | C |
| ATOM | 3085 | CG | LYS | 391 | 58.837 | 64.083 | −62.837 | 1.00 | 36.83 | | C |
| ATOM | 3086 | CD | LYS | 391 | 57.756 | 65.114 | −63.066 | 1.00 | 36.83 | | C |
| ATOM | 3087 | CE | LYS | 391 | 58.321 | 66.533 | −62.959 | 1.00 | 36.83 | | C |
| ATOM | 3088 | NZ | LYS | 391 | 59.235 | 66.901 | −64.088 | 1.00 | 36.83 | | N |
| ATOM | 3089 | C | LYS | 391 | 58.654 | 61.904 | −60.302 | 1.00 | 36.83 | | C |
| ATOM | 3090 | O | LYS | 391 | 58.010 | 61.019 | −60.846 | 1.00 | 36.83 | | O |
| ATOM | 3091 | N | ALA | 392 | 59.714 | 61.660 | −59.545 | 1.00 | 36.83 | | N |
| ATOM | 3092 | CA | ALA | 392 | 60.212 | 60.305 | −59.326 | 1.00 | 36.83 | | C |
| ATOM | 3093 | CB | ALA | 392 | 61.542 | 60.362 | −58.585 | 1.00 | 36.83 | | C |
| ATOM | 3094 | C | ALA | 392 | 59.230 | 59.434 | −58.552 | 1.00 | 36.83 | | C |
| ATOM | 3095 | O | ALA | 392 | 59.227 | 58.210 | −58.692 | 1.00 | 36.83 | | O |
| ATOM | 3096 | N | LEU | 393 | 58.395 | 60.079 | −57.749 | 1.00 | 36.83 | | N |
| ATOM | 3097 | CA | LEU | 393 | 57.413 | 59.398 | −56.921 | 1.00 | 36.83 | | C |
| ATOM | 3098 | CB | LEU | 393 | 56.982 | 60.324 | −55.781 | 1.00 | 36.83 | | C |
| ATOM | 3099 | CG | LEU | 393 | 57.024 | 59.882 | −54.320 | 1.00 | 36.83 | | C |
| ATOM | 3100 | CD1 | LEU | 393 | 58.416 | 59.464 | −53.903 | 1.00 | 36.83 | | C |
| ATOM | 3101 | CD2 | LEU | 393 | 56.531 | 61.054 | −53.461 | 1.00 | 36.83 | | C |
| ATOM | 3102 | C | LEU | 393 | 56.179 | 58.944 | −57.687 | 1.00 | 36.83 | | C |
| ATOM | 3103 | O | LEU | 393 | 55.692 | 57.836 | −57.480 | 1.00 | 36.83 | | O |
| ATOM | 3104 | N | MET | 394 | 55.681 | 59.789 | −58.581 | 1.00 | 36.83 | | N |
| ATOM | 3105 | CA | MET | 394 | 54.475 | 59.467 | −59.332 | 1.00 | 36.83 | | C |
| ATOM | 3106 | CB | MET | 394 | 53.498 | 60.632 | −59.217 | 1.00 | 36.83 | | C |
| ATOM | 3107 | CG | MET | 394 | 53.432 | 61.198 | −57.819 | 1.00 | 36.83 | | C |
| ATOM | 3108 | SD | MET | 394 | 52.154 | 62.442 | −57.628 | 1.00 | 36.83 | | S |
| ATOM | 3109 | CE | MET | 394 | 53.128 | 63.950 | −57.823 | 1.00 | 36.83 | | C |
| ATOM | 3110 | C | MET | 394 | 54.722 | 59.150 | −60.801 | 1.00 | 36.83 | | C |
| ATOM | 3111 | O | MET | 394 | 53.890 | 58.518 | −61.461 | 1.00 | 36.83 | | O |
| ATOM | 3112 | N | GLU | 395 | 55.871 | 59.589 | −61.307 | 1.00 | 36.83 | | N |
| ATOM | 3113 | CA | GLU | 395 | 56.209 | 59.367 | −62.706 | 1.00 | 36.83 | | C |
| ATOM | 3114 | CB | GLU | 395 | 55.972 | 60.650 | −63.509 | 1.00 | 36.83 | | C |
| ATOM | 3115 | CG | GLU | 395 | 54.537 | 61.160 | −63.434 | 1.00 | 36.83 | | C |
| ATOM | 3116 | CD | GLU | 395 | 54.296 | 62.406 | −64.293 | 1.00 | 36.83 | | C |
| ATOM | 3117 | OE1 | GLU | 395 | 54.353 | 62.309 | −65.540 | 1.00 | 36.83 | | O |
| ATOM | 3118 | OE2 | GLU | 395 | 54.054 | 63.487 | −63.716 | 1.00 | 36.83 | | O |
| ATOM | 3119 | C | GLU | 395 | 57.649 | 58.885 | −62.903 | 1.00 | 36.83 | | C |
| ATOM | 3120 | O | GLU | 395 | 58.441 | 59.519 | −63.598 | 1.00 | 36.83 | | O |
| ATOM | 3121 | N | PRO | 396 | 58.004 | 57.746 | −62.293 | 1.00 | 36.83 | | N |
| ATOM | 3122 | CD | PRO | 396 | 57.191 | 56.860 | −61.439 | 1.00 | 36.83 | | C |
| ATOM | 3123 | CA | PRO | 396 | 59.364 | 57.225 | −62.446 | 1.00 | 36.83 | | C |
| ATOM | 3124 | CB | PRO | 396 | 59.414 | 56.108 | −61.403 | 1.00 | 36.83 | | C |
| ATOM | 3125 | CG | PRO | 396 | 58.010 | 55.578 | −61.427 | 1.00 | 36.83 | | C |
| ATOM | 3126 | C | PRO | 396 | 59.571 | 56.702 | −63.872 | 1.00 | 36.83 | | C |
| ATOM | 3127 | O | PRO | 396 | 58.625 | 56.239 | −64.508 | 1.00 | 36.83 | | O |
| ATOM | 3128 | N | ARG | 397 | 60.805 | 56.773 | −64.368 | 1.00 | 36.83 | | N |
| ATOM | 3129 | CA | ARG | 397 | 61.116 | 56.295 | −65.714 | 1.00 | 36.83 | | C |
| ATOM | 3130 | CB | ARG | 397 | 62.110 | 57.236 | −66.401 | 1.00 | 36.83 | | C |
| ATOM | 3131 | CG | ARG | 397 | 61.710 | 58.696 | −66.401 | 1.00 | 36.83 | | C |
| ATOM | 3132 | CD | ARG | 397 | 62.750 | 59.493 | −65.660 | 1.00 | 36.83 | | C |
| ATOM | 3133 | NE | ARG | 397 | 63.806 | 60.009 | −66.518 | 1.00 | 36.83 | | N |
| ATOM | 3134 | CZ | ARG | 397 | 65.027 | 60.319 | −66.085 | 1.00 | 36.83 | | C |
| ATOM | 3135 | NH1 | ARG | 397 | 65.338 | 60.143 | −64.809 | 1.00 | 36.83 | | N |
| ATOM | 3136 | NH2 | ARG | 397 | 65.926 | 60.833 | −66.921 | 1.00 | 36.83 | | N |
| ATOM | 3137 | C | ARG | 397 | 61.736 | 54.912 | −65.670 | 1.00 | 36.83 | | C |
| ATOM | 3138 | O | ARG | 397 | 62.633 | 54.670 | −64.880 | 1.00 | 36.83 | | O |
| ATOM | 3139 | N | ILE | 398 | 61.262 | 53.999 | −66.504 | 1.00 | 36.83 | | N |
| ATOM | 3140 | CA | ILE | 398 | 61.848 | 52.659 | −66.551 | 1.00 | 36.83 | | C |
| ATOM | 3141 | CB | ILE | 398 | 60.895 | 51.560 | −66.010 | 1.00 | 36.83 | | C |
| ATOM | 3142 | CG2 | ILE | 398 | 60.641 | 51.761 | −64.512 | 1.00 | 36.83 | | C |
| ATOM | 3143 | CG1 | ILE | 398 | 59.591 | 51.563 | −66.813 | 1.00 | 36.83 | | C |
| ATOM | 3144 | CD1 | ILE | 398 | 58.662 | 50.435 | −66.458 | 1.00 | 36.83 | | C |
| ATOM | 3145 | C | ILE | 398 | 62.116 | 52.349 | −68.012 | 1.00 | 36.83 | | C |
| ATOM | 3146 | O | ILE | 398 | 61.797 | 53.153 | −68.892 | 1.00 | 36.83 | | O |
| ATOM | 3147 | N | LEU | 399 | 62.699 | 51.185 | −68.269 | 1.00 | 36.83 | | N |
| ATOM | 3148 | CA | LEU | 399 | 62.962 | 50.759 | −69.633 | 1.00 | 36.83 | | C |
| ATOM | 3149 | CB | LEU | 399 | 64.333 | 50.099 | −69.745 | 1.00 | 36.83 | | C |
| ATOM | 3150 | CG | LEU | 399 | 65.537 | 50.827 | −69.175 | 1.00 | 36.83 | | C |
| ATOM | 3151 | CD1 | LEU | 399 | 65.590 | 50.540 | −67.678 | 1.00 | 36.83 | | C |
| ATOM | 3152 | CD2 | LEU | 399 | 66.816 | 50.358 | −69.868 | 1.00 | 36.83 | | C |
| ATOM | 3153 | C | LEU | 399 | 61.915 | 49.746 | −70.071 | 1.00 | 36.83 | | C |
| ATOM | 3154 | O | LEU | 399 | 61.446 | 48.940 | −69.277 | 1.00 | 36.83 | | O |
| ATOM | 3155 | N | ALA | 400 | 61.539 | 49.818 | −71.335 | 1.00 | 36.83 | | N |
| ATOM | 3156 | CA | ALA | 400 | 60.589 | 48.893 | −71.942 | 1.00 | 36.83 | | C |
| ATOM | 3157 | CB | ALA | 400 | 59.355 | 49.627 | −72.418 | 1.00 | 36.83 | | C |
| ATOM | 3158 | C | ALA | 400 | 61.416 | 48.396 | −73.125 | 1.00 | 36.83 | | C |
| ATOM | 3159 | O | ALA | 400 | 61.354 | 48.952 | −74.221 | 1.00 | 36.83 | | O |
| ATOM | 3160 | N | GLY | 401 | 62.214 | 47.361 | −72.866 | 1.00 | 36.83 | | N |
| ATOM | 3161 | CA | GLY | 401 | 63.116 | 96.832 | −73.875 | 1.00 | 36.83 | | C |
| ATOM | 3162 | C | GLY | 401 | 64.323 | 47.738 | −73.716 | 1.00 | 36.83 | | C |
| ATOM | 3163 | O | GLY | 401 | 65.069 | 47.605 | −72.746 | 1.00 | 36.83 | | O |
| ATOM | 3164 | N | ARG | 402 | 64.506 | 48.674 | −74.641 | 1.00 | 36.83 | | N |
| ATOM | 3165 | CA | ARG | 402 | 65.609 | 49.631 | −74.536 | 1.00 | 36.83 | | C |
| ATOM | 3166 | CB | ARG | 402 | 66.604 | 49.429 | −75.684 | 1.00 | 36.83 | | C |
| ATOM | 3167 | CG | ARG | 402 | 67.514 | 48.225 | −75.465 | 1.00 | 36.83 | | C |
| ATOM | 3168 | CD | ARG | 402 | 68.423 | 47.976 | −76.648 | 1.00 | 36.83 | | C |
| ATOM | 3169 | NE | ARG | 402 | 69.352 | 46.891 | −76.363 | 1.00 | 36.83 | | N |
| ATOM | 3170 | CZ | ARG | 402 | 70.567 | 47.056 | −75.859 | 1.00 | 36.83 | | C |
| ATOM | 3171 | NH1 | ARG | 402 | 71.017 | 48.279 | −75.588 | 1.00 | 36.83 | | N |
| ATOM | 3172 | NH2 | ARG | 402 | 71.322 | 45.985 | −75.615 | 1.00 | 36.83 | | N |
| ATOM | 3173 | C | ARG | 402 | 65.087 | 51.073 | −74.519 | 1.00 | 36.83 | | C |
| ATOM | 3174 | O | ARG | 402 | 65.824 | 52.008 | −74.229 | 1.00 | 36.83 | | O |
| ATOM | 3175 | N | ASP | 403 | 63.800 | 51.229 | −74.810 | 1.00 | 36.83 | | N |
| ATOM | 3176 | CA | ASP | 403 | 63.149 | 52.534 | −74.841 | 1.00 | 36.83 | | C |
| ATOM | 3177 | CB | ASP | 403 | 61.789 | 52.400 | −75.532 | 1.00 | 36.83 | | C |
| ATOM | 3178 | CG | ASP | 403 | 61.188 | 53.735 | −75.911 | 1.00 | 36.83 | | C |
| ATOM | 3179 | OD1 | ASP | 403 | 61.734 | 54.791 | −75.533 | 1.00 | 36.83 | | O |
| ATOM | 3180 | OD2 | ASP | 403 | 60.157 | 53.729 | −76.599 | 1.00 | 36.83 | | O |
| ATOM | 3181 | C | ASP | 403 | 62.964 | 53.095 | −73.426 | 1.00 | 36.83 | | C |
| ATOM | 3182 | O | ASP | 403 | 62.702 | 52.341 | −72.476 | 1.00 | 36.83 | | O |
| ATOM | 3183 | N | LEU | 404 | 63.119 | 54.407 | −73.272 | 1.00 | 36.83 | | N |
| ATOM | 3184 | CA | LEU | 404 | 62.962 | 55.036 | −71.964 | 1.00 | 36.83 | | C |
| ATOM | 3185 | CB | LEU | 404 | 63.892 | 56.238 | −71.815 | 1.00 | 36.83 | | C |
| ATOM | 3186 | CG | LEU | 404 | 63.985 | 56.818 | −70.396 | 1.00 | 36.83 | | C |
| ATOM | 3187 | CD1 | LEU | 404 | 64.460 | 55.752 | −69.415 | 1.00 | 36.83 | | C |
| ATOM | 3188 | CD2 | LEU | 404 | 64.952 | 57.979 | −70.393 | 1.00 | 36.83 | | C |
| ATOM | 3189 | C | LEU | 404 | 61.528 | 55.492 | −71.856 | 1.00 | 36.83 | | C |
| ATOM | 3190 | O | LEU | 404 | 61.119 | 56.465 | −72.509 | 1.00 | 36.83 | | O |
| ATOM | 3191 | N | VAL | 405 | 60.761 | 54.798 | −71.024 | 1.00 | 36.83 | | N |
| ATOM | 3192 | CA | VAL | 405 | 59.344 | 55.096 | −70.858 | 1.00 | 36.83 | | C |
| ATOM | 3193 | CB | VAL | 405 | 58.506 | 53.846 | −71.212 | 1.00 | 36.83 | | C |
| ATOM | 3194 | CG1 | VAL | 405 | 57.064 | 54.058 | −70.857 | 1.00 | 36.83 | | C |
| ATOM | 3195 | CG2 | VAL | 405 | 58.634 | 53.556 | −72.689 | 1.00 | 36.83 | | C |
| ATOM | 3196 | C | VAL | 405 | 58.971 | 55.575 | −69.457 | 1.00 | 36.83 | | C |
| ATOM | 3197 | O | VAL | 405 | 59.156 | 54.870 | −68.474 | 1.00 | 36.83 | | O |
| ATOM | 3198 | N | ALA | 406 | 58.436 | 56.781 | −69.368 | 1.00 | 36.83 | | N |
| ATOM | 3199 | CA | ALA | 406 | 58.047 | 57.311 | −68.072 | 1.00 | 36.83 | | C |
| ATOM | 3200 | CB | ALA | 406 | 58.136 | 58.838 | −68.054 | 1.00 | 36.83 | | C |
| ATOM | 3201 | C | ALA | 406 | 56.626 | 56.883 | −67.840 | 1.00 | 36.83 | | C |
| ATOM | 3202 | O | ALA | 406 | 55.782 | 57.016 | −68.714 | 1.00 | 36.83 | | O |
| ATOM | 3203 | N | GLN | 407 | 56.354 | 56.345 | −66.664 | 1.00 | 36.83 | | N |
| ATOM | 3204 | CA | GLN | 407 | 55.000 | 55.940 | −66.365 | 1.00 | 36.83 | | C |
| ATOM | 3205 | CB | GLN | 407 | 54.972 | 54.537 | −65.770 | 1.00 | 36.83 | | C |
| ATOM | 3206 | CG | GLN | 407 | 56.173 | 54.184 | −64.923 | 1.00 | 36.83 | | C |
| ATOM | 3207 | CD | GLN | 407 | 56.096 | 52.746 | −64.470 | 1.00 | 36.83 | | C |
| ATOM | 3208 | OE1 | GLN | 407 | 55.679 | 51.874 | −65.235 | 1.00 | 36.83 | | O |
| ATOM | 3209 | NE2 | GLN | 407 | 56.492 | 52.486 | −63.229 | 1.00 | 36.83 | | N |
| ATOM | 3210 | C | GLN | 407 | 54.388 | 56.922 | −65.394 | 1.00 | 36.83 | | C |
| ATOM | 3211 | O | GLN | 407 | 55.042 | 57.853 | −64.927 | 1.00 | 36.83 | | O |
| ATOM | 3212 | N | HIS | 408 | 53.111 | 56.713 | −65.117 | 1.00 | 36.83 | | N |
| ATOM | 3213 | CA | HIS | 408 | 52.391 | 57.549 | −64.189 | 1.00 | 36.83 | | C |
| ATOM | 3214 | CB | HIS | 408 | 51.419 | 58.468 | −64.943 | 1.00 | 36.83 | | C |
| ATOM | 3215 | CG | HIS | 408 | 50.830 | 59.549 | −64.090 | 1.00 | 36.83 | | C |
| ATOM | 3216 | CD2 | HIS | 408 | 50.954 | 59.805 | −62.767 | 1.00 | 36.83 | | C |
| ATOM | 3217 | ND1 | HIS | 408 | 49.998 | 60.529 | −64.596 | 1.00 | 36.83 | | N |
| ATOM | 3218 | CE1 | HIS | 408 | 49.638 | 61.341 | −63.618 | 1.00 | 36.83 | | C |
| ATOM | 3219 | NE2 | HIS | 408 | 50.203 | 60.924 | −62.498 | 1.00 | 36.83 | | N |
| ATOM | 3220 | C | HIS | 408 | 51.649 | 56.553 | −63.319 | 1.00 | 36.83 | | C |
| ATOM | 3221 | O | HIS | 408 | 50.707 | 55.892 | −63.770 | 1.00 | 36.83 | | O |
| ATOM | 3222 | N | LEU | 409 | 52.106 | 56.432 | −62.077 | 1.00 | 36.83 | | N |
| ATOM | 3223 | CA | LEU | 409 | 51.519 | 55.506 | −61.118 | 1.00 | 36.83 | | C |
| ATOM | 3224 | CB | LEU | 409 | 52.510 | 55.246 | −59.979 | 1.00 | 36.83 | | C |
| ATOM | 3225 | CG | LEU | 409 | 53.916 | 54.769 | −60.340 | 1.00 | 36.83 | | C |
| ATOM | 3226 | CD1 | LEU | 409 | 54.733 | 54.700 | −59.075 | 1.00 | 36.83 | | C |
| ATOM | 3227 | CD2 | LEU | 409 | 53.867 | 53.411 | −61.041 | 1.00 | 36.83 | | C |
| ATOM | 3228 | C | LEU | 409 | 50.226 | 56.059 | −60.529 | 1.00 | 36.83 | | C |
| ATOM | 3229 | O | LEU | 409 | 50.031 | 57.279 | −60.479 | 1.00 | 36.83 | | O |
| ATOM | 3230 | N | ASN | 410 | 49.337 | 55.171 | −60.094 | 1.00 | 36.83 | | N |
| ATOM | 3231 | CA | ASN | 410 | 48.095 | 55.633 | −59.470 | 1.00 | 36.83 | | C |
| ATOM | 3232 | CB | ASN | 410 | 47.014 | 54.554 | −59.497 | 1.00 | 36.83 | | C |
| ATOM | 3233 | CG | ASN | 410 | 47.495 | 53.247 | −58.948 | 1.00 | 36.83 | | C |
| ATOM | 3234 | OD1 | ASN | 410 | 48.430 | 53.209 | −58.152 | 1.00 | 36.83 | | O |
| ATOM | 3235 | ND2 | ASN | 410 | 46.856 | 52.161 | −59.356 | 1.00 | 36.83 | | N |
| ATOM | 3236 | C | ASN | 410 | 48.402 | 56.005 | −58.020 | 1.00 | 36.83 | | C |
| ATOM | 3237 | O | ASN | 410 | 49.556 | 56.221 | −57.654 | 1.00 | 36.83 | | O |
| ATOM | 3238 | N | VAL | 411 | 47.369 | 56.063 | −57.195 | 1.00 | 36.83 | | N |
| ATOM | 3239 | CA | VAL | 411 | 47.533 | 56.423 | −55.797 | 1.00 | 36.83 | | C |
| ATOM | 3240 | CB | VAL | 411 | 46.168 | 56.761 | −55.174 | 1.00 | 36.83 | | C |
| ATOM | 3241 | CG1 | VAL | 411 | 46.338 | 57.254 | −53.748 | 1.00 | 36.83 | | C |
| ATOM | 3242 | CG2 | VAL | 411 | 45.476 | 57.810 | −56.019 | 1.00 | 36.83 | | C |
| ATOM | 3243 | C | VAL | 411 | 48.174 | 55.283 | −55.029 | 1.00 | 36.83 | | C |
| ATOM | 3244 | O | VAL | 411 | 49.133 | 55.473 | −54.296 | 1.00 | 36.83 | | O |
| ATOM | 3245 | N | GLU | 412 | 47.648 | 54.085 | −55.214 | 1.00 | 36.83 | | N |
| ATOM | 3246 | CA | GLU | 412 | 48.178 | 52.933 | −54.509 | 1.00 | 36.83 | | C |
| ATOM | 3247 | CB | GLU | 412 | 47.327 | 51.692 | −54.820 | 1.00 | 36.83 | | C |
| ATOM | 3248 | CG | GLU | 412 | 47.516 | 50.583 | −53.793 | 1.00 | 36.83 | | C |
| ATOM | 3249 | CD | GLU | 412 | 46.401 | 49.534 | −53.818 | 1.00 | 36.83 | | C |
| ATOM | 3250 | OE1 | GLU | 412 | 46.476 | 48.576 | −52.999 | 1.00 | 36.83 | | O |
| ATOM | 3251 | OE2 | GLU | 412 | 45.458 | 49.678 | −54.644 | 1.00 | 36.83 | | O |
| ATOM | 3252 | C | GLU | 412 | 49.658 | 52.674 | −54.838 | 1.00 | 36.83 | | C |
| ATOM | 3253 | O | GLU | 412 | 50.437 | 52.330 | −53.952 | 1.00 | 36.83 | | O |
| ATOM | 3254 | N | LYS | 413 | 50.038 | 52.869 | −56.098 | 1.00 | 36.83 | | N |
| ATOM | 3255 | CA | LYS | 413 | 51.410 | 52.642 | −56.530 | 1.00 | 36.83 | | C |
| ATOM | 3256 | CB | LYS | 413 | 51.487 | 52.612 | −58.053 | 1.00 | 36.83 | | C |
| ATOM | 3257 | CG | LYS | 413 | 51.809 | 51.257 | −58.660 | 1.00 | 36.83 | | C |
| ATOM | 3258 | CD | LYS | 413 | 50.632 | 50.291 | −58.614 | 1.00 | 36.83 | | C |
| ATOM | 3259 | CE | LYS | 413 | 50.898 | 49.100 | −59.537 | 1.00 | 36.83 | | C |
| ATOM | 3260 | NZ | LYS | 413 | 50.027 | 47.925 | −59.264 | 1.00 | 36.83 | | N |
| ATOM | 3261 | C | LYS | 413 | 52.369 | 53.699 | −56.008 | 1.00 | 36.83 | | C |
| ATOM | 3262 | O | LYS | 413 | 53.479 | 53.377 | −55.598 | 1.00 | 36.83 | | O |
| ATOM | 3263 | N | SER | 414 | 51.948 | 54.962 | −56.043 | 1.00 | 36.83 | | N |
| ATOM | 3264 | CA | SER | 414 | 52.784 | 56.063 | −55.556 | 1.00 | 36.83 | | C |
| ATOM | 3265 | CB | SER | 414 | 52.135 | 57.419 | −55.845 | 1.00 | 36.83 | | C |
| ATOM | 3266 | OG | SER | 414 | 51.719 | 57.505 | −57.189 | 1.00 | 36.83 | | O |
| ATOM | 3267 | C | SER | 414 | 52.993 | 55.935 | −54.056 | 1.00 | 36.83 | | C |
| ATOM | 3268 | O | SER | 414 | 54.087 | 56.139 | −53.559 | 1.00 | 36.83 | | O |
| ATOM | 3269 | N | SER | 415 | 51.933 | 55.598 | −53.334 | 1.00 | 36.83 | | N |
| ATOM | 3270 | CA | SER | 415 | 52.027 | 55.444 | −51.887 | 1.00 | 36.83 | | C |
| ATOM | 3271 | CB | SER | 415 | 50.662 | 55.059 | −51.313 | 1.00 | 36.83 | | C |
| ATOM | 3272 | OG | SER | 415 | 50.643 | 55.206 | −49.900 | 1.00 | 36.83 | | O |
| ATOM | 3273 | C | SER | 415 | 53.078 | 54.365 | −51.564 | 1.00 | 36.83 | | C |
| ATOM | 3274 | O | SER | 415 | 53.933 | 54.559 | −50.698 | 1.00 | 36.83 | | O |
| ATOM | 3275 | N | SER | 416 | 53.007 | 53.244 | −52.279 | 1.00 | 36.83 | | N |
| ATOM | 3276 | CA | SER | 416 | 53.942 | 52.140 | −52.113 | 1.00 | 36.83 | | C |
| ATOM | 3277 | CB | SER | 416 | 53.536 | 50.967 | −52.994 | 1.00 | 36.83 | | C |
| ATOM | 3278 | OG | SER | 416 | 52.367 | 50.364 | −52.472 | 1.00 | 36.83 | | O |
| ATOM | 3279 | C | SER | 416 | 55.386 | 52.523 | −52.418 | 1.00 | 36.83 | | C |
| ATOM | 3280 | O | SER | 416 | 56.283 | 52.152 | −51.667 | 1.00 | 36.83 | | O |
| ATOM | 3281 | N | SER | 417 | 55.605 | 53.257 | −53.513 | 1.00 | 36.83 | | N |
| ATOM | 3282 | CA | SER | 417 | 56.950 | 53.699 | −53.887 | 1.00 | 36.83 | | C |
| ATOM | 3283 | CB | SER | 417 | 56.921 | 54.506 | −55.202 | 1.00 | 36.83 | | C |
| ATOM | 3284 | OG | SER | 417 | 58.208 | 55.018 | −55.547 | 1.00 | 36.83 | | O |
| ATOM | 3285 | C | SER | 417 | 57.477 | 54.566 | −52.753 | 1.00 | 36.83 | | C |
| ATOM | 3286 | O | SER | 417 | 58.591 | 54.368 | −52.282 | 1.00 | 36.83 | | O |
| ATOM | 3287 | N | ARG | 418 | 56.659 | 55.516 | −52.311 | 1.00 | 36.83 | | N |
| ATOM | 3288 | CA | ARG | 418 | 57.013 | 56.406 | −51.203 | 1.00 | 36.83 | | C |
| ATOM | 3289 | CB | ARG | 418 | 55.811 | 57.311 | −50.855 | 1.00 | 36.83 | | C |
| ATOM | 3290 | CG | ARG | 418 | 55.973 | 58.220 | −49.626 | 1.00 | 36.83 | | C |
| ATOM | 3291 | CD | ARG | 418 | 55.455 | 57.556 | −48.346 | 1.00 | 36.83 | | C |
| ATOM | 3292 | NE | ARG | 418 | 54.036 | 57.203 | −48.440 | 1.00 | 36.83 | | N |
| ATOM | 3293 | CZ | ARG | 418 | 53.036 | 58.085 | −48.412 | 1.00 | 36.83 | | C |
| ATOM | 3294 | NH1 | ARG | 418 | 53.283 | 59.381 | −48.283 | 1.00 | 36.83 | | N |
| ATOM | 3295 | NH2 | ARG | 418 | 51.788 | 57.679 | −48.534 | 1.00 | 36.83 | | N |
| ATOM | 3296 | C | ARG | 418 | 57.436 | 55.565 | −49.992 | 1.00 | 36.83 | | C |
| ATOM | 3297 | O | ARG | 418 | 58.463 | 55.836 | −49.369 | 1.00 | 36.83 | | O |
| ATOM | 3298 | N | ASP | 419 | 56.652 | 54.536 | −49.667 | 1.00 | 36.83 | | N |
| ATOM | 3299 | CA | ASP | 419 | 56.996 | 53.675 | −48.536 | 1.00 | 36.83 | | C |
| ATOM | 3300 | CB | ASP | 419 | 55.922 | 52.607 | −48.306 | 1.00 | 36.83 | | C |
| ATOM | 3301 | CG | ASP | 419 | 54.673 | 53.161 | −47.655 | 1.00 | 36.83 | | C |
| ATOM | 3302 | OD1 | ASP | 419 | 54.669 | 54.340 | −47.223 | 1.00 | 36.83 | | O |
| ATOM | 3303 | OD2 | ASP | 419 | 53.687 | 52.400 | −47.566 | 1.00 | 36.83 | | O |
| ATOM | 3304 | C | ASP | 419 | 58.348 | 53.000 | −48.762 | 1.00 | 36.83 | | C |
| ATOM | 3305 | O | ASP | 419 | 59.152 | 52.875 | −47.827 | 1.00 | 36.83 | | O |
| ATOM | 3306 | N | ALA | 420 | 58.585 | 52.571 | −50.004 | 1.00 | 36.83 | | N |
| ATOM | 3307 | CA | ALA | 420 | 59.844 | 51.922 | −50.384 | 1.00 | 36.83 | | C |
| ATOM | 3308 | CB | ALA | 420 | 59.803 | 51.498 | −51.853 | 1.00 | 36.83 | | C |
| ATOM | 3309 | C | ALA | 420 | 61.015 | 52.876 | −50.160 | 1.00 | 36.83 | | C |
| ATOM | 3310 | O | ALA | 420 | 62.049 | 52.477 | −49.645 | 1.00 | 36.83 | | O |
| ATOM | 3311 | N | LEU | 421 | 60.851 | 54.130 | −50.575 | 1.00 | 36.83 | | N |
| ATOM | 3312 | CA | LEU | 421 | 61.896 | 55.131 | −50.391 | 1.00 | 36.83 | | C |
| ATOM | 3313 | CB | LEU | 421 | 61.488 | 56.481 | −50.999 | 1.00 | 36.83 | | C |
| ATOM | 3314 | CG | LEU | 421 | 62.376 | 57.671 | −50.593 | 1.00 | 36.83 | | C |
| ATOM | 3315 | CD1 | LEU | 421 | 63.816 | 57.400 | −51.026 | 1.00 | 36.83 | | C |
| ATOM | 3316 | CD2 | LEU | 421 | 61.853 | 58.983 | −51.208 | 1.00 | 36.83 | | C |
| ATOM | 3317 | C | LEU | 421 | 62.105 | 55.290 | −48.895 | 1.00 | 36.83 | | C |
| ATOM | 3318 | O | LEU | 421 | 63.235 | 55.361 | −48.428 | 1.00 | 36.83 | | O |
| ATOM | 3319 | N | VAL | 422 | 61.009 | 55.330 | −48.143 | 1.00 | 36.83 | | N |
| ATOM | 3320 | CA | VAL | 422 | 61.101 | 55.470 | −46.690 | 1.00 | 36.83 | | C |
| ATOM | 3321 | CB | VAL | 422 | 59.688 | 55.589 | −46.032 | 1.00 | 36.83 | | C |
| ATOM | 3322 | CG1 | VAL | 422 | 59.743 | 55.161 | −44.566 | 1.00 | 36.83 | | C |
| ATOM | 3323 | CG2 | VAL | 422 | 59.197 | 57.034 | −46.136 | 1.00 | 36.83 | | C |
| ATOM | 3324 | C | VAL | 422 | 61.874 | 54.319 | −46.034 | 1.00 | 36.83 | | C |
| ATOM | 3325 | O | VAL | 422 | 62.786 | 54.563 | −45.242 | 1.00 | 36.83 | | O |
| ATOM | 3326 | N | LYS | 423 | 61.504 | 53.079 | −46.364 | 1.00 | 36.83 | | N |
| ATOM | 3327 | CA | LYS | 423 | 62.167 | 51.902 | −45.804 | 1.00 | 36.83 | | C |
| ATOM | 3328 | CB | LYS | 423 | 61.417 | 50.630 | −46.209 | 1.00 | 36.83 | | C |
| ATOM | 3329 | CG | LYS | 423 | 60.147 | 50.422 | −45.413 | 1.00 | 36.83 | | C |
| ATOM | 3330 | CD | LYS | 423 | 59.037 | 49.852 | −46.253 | 1.00 | 36.83 | | C |
| ATOM | 3331 | CE | LYS | 423 | 59.098 | 48.349 | −46.337 | 1.00 | 36.83 | | C |
| ATOM | 3332 | NZ | LYS | 423 | 57.893 | 47.817 | −47.047 | 1.00 | 36.83 | | N |
| ATOM | 3333 | C | LYS | 423 | 63.630 | 51.801 | −46.224 | 1.00 | 36.83 | | C |
| ATOM | 3334 | O | LYS | 423 | 64.463 | 51.350 | −45.457 | 1.00 | 36.83 | | O |
| ATOM | 3335 | N | ALA | 424 | 63.932 | 52.214 | −47.446 | 1.00 | 36.83 | | N |
| ATOM | 3336 | CA | ALA | 424 | 65.297 | 52.181 | −47.945 | 1.00 | 36.83 | | C |
| ATOM | 3337 | CB | ALA | 424 | 65.321 | 52.492 | −49.431 | 1.00 | 36.83 | | C |
| ATOM | 3338 | C | ALA | 424 | 66.099 | 53.216 | −47.169 | 1.00 | 36.83 | | C |
| ATOM | 3339 | O | ALA | 424 | 67.258 | 52.987 | −46.837 | 1.00 | 36.83 | | O |
| ATOM | 3340 | N | LEU | 425 | 65.483 | 54.355 | −46.877 | 1.00 | 36.83 | | N |
| ATOM | 3341 | CA | LEU | 425 | 66.174 | 55.391 | −46.107 | 1.00 | 36.83 | | C |
| ATOM | 3342 | CB | LEU | 425 | 65.331 | 56.679 | −46.025 | 1.00 | 36.83 | | C |
| ATOM | 3343 | CG | LEU | 425 | 65.347 | 57.609 | −47.245 | 1.00 | 36.83 | | C |
| ATOM | 3344 | CD1 | LEU | 425 | 64.145 | 58.542 | −47.196 | 1.00 | 36.83 | | C |
| ATOM | 3345 | CD2 | LEU | 425 | 66.639 | 58.404 | −47.282 | 1.00 | 36.83 | | C |
| ATOM | 3346 | C | LEU | 425 | 66.515 | 54.920 | −44.697 | 1.00 | 36.83 | | C |
| ATOM | 3347 | O | LEU | 425 | 67.673 | 54.940 | −44.303 | 1.00 | 36.83 | | O |
| ATOM | 3348 | N | TYR | 426 | 65.511 | 54.480 | −43.942 | 1.00 | 36.83 | | N |
| ATOM | 3349 | CA | TYR | 426 | 65.747 | 54.046 | −42.560 | 1.00 | 36.83 | | C |
| ATOM | 3350 | CB | TYR | 426 | 64.429 | 53.636 | −41.889 | 1.00 | 36.83 | | C |
| ATOM | 3351 | CG | TYR | 426 | 64.493 | 53.628 | −40.376 | 1.00 | 36.83 | | C |
| ATOM | 3352 | CD1 | TYR | 426 | 64.323 | 54.806 | −39.644 | 1.00 | 36.83 | | C |
| ATOM | 3353 | CE1 | TYR | 426 | 64.408 | 54.819 | −38.261 | 1.00 | 36.83 | | C |
| ATOM | 3354 | CD2 | TYR | 426 | 64.749 | 52.449 | −39.674 | 1.00 | 36.83 | | C |
| ATOM | 3355 | CE2 | TYR | 426 | 64.836 | 52.449 | −38.284 | 1.00 | 36.83 | | C |
| ATOM | 3356 | CZ | TYR | 426 | 64.667 | 53.641 | −37.584 | 1.00 | 36.83 | | C |
| ATOM | 3357 | OH | TYR | 426 | 64.768 | 53.653 | −36.217 | 1.00 | 36.83 | | O |
| ATOM | 3358 | C | TYR | 426 | 66.744 | 52.889 | −42.497 | 1.00 | 36.83 | | C |
| ATOM | 3359 | O | TYR | 426 | 67.683 | 52.902 | −41.684 | 1.00 | 36.83 | | O |
| ATOM | 3360 | N | GLY | 427 | 66.541 | 51.904 | −43.370 | 1.00 | 36.83 | | N |
| ATOM | 3361 | CA | GLY | 427 | 67.419 | 50.747 | −43.420 | 1.00 | 36.83 | | C |
| ATOM | 3362 | C | GLY | 427 | 68.891 | 51.057 | −43.688 | 1.00 | 36.83 | | C |
| ATOM | 3363 | O | GLY | 427 | 69.784 | 50.461 | −43.077 | 1.00 | 36.83 | | O |
| ATOM | 3364 | N | ARG | 428 | 69.161 | 51.979 | −44.603 | 1.00 | 36.83 | | N |
| ATOM | 3365 | CA | ARG | 428 | 70.549 | 52.319 | −44.895 | 1.00 | 36.83 | | C |
| ATOM | 3366 | CB | ARG | 428 | 70.661 | 53.038 | −46.231 | 1.00 | 36.83 | | C |
| ATOM | 3367 | CG | ARG | 428 | 70.273 | 52.178 | −47.395 | 1.00 | 36.83 | | C |
| ATOM | 3368 | CD | ARG | 428 | 70.264 | 52.970 | −48.681 | 1.00 | 36.83 | | C |
| ATOM | 3369 | NE | ARG | 428 | 69.777 | 52.147 | −49.780 | 1.00 | 36.83 | | N |
| ATOM | 3370 | CZ | ARG | 428 | 69.742 | 52.519 | −51.053 | 1.00 | 36.83 | | C |
| ATOM | 3371 | NH1 | ARG | 428 | 70.172 | 53.717 | −51.422 | 1.00 | 36.83 | | N |
| ATOM | 3372 | NH2 | ARG | 428 | 69.260 | 51.684 | −51.955 | 1.00 | 36.83 | | N |
| ATOM | 3373 | C | ARG | 428 | 71.098 | 53.187 | −43.784 | 1.00 | 36.83 | | C |
| ATOM | 3374 | O | ARG | 428 | 72.295 | 53.214 | −43.556 | 1.00 | 36.83 | | O |
| ATOM | 3375 | N | LEU | 429 | 70.220 | 53.903 | −43.089 | 1.00 | 36.83 | | N |
| ATOM | 3376 | CA | LEU | 429 | 70.670 | 54.735 | −41.985 | 1.00 | 36.83 | | C |
| ATOM | 3377 | CB | LEU | 429 | 69.529 | 55.616 | −41.443 | 1.00 | 36.83 | | C |
| ATOM | 3378 | CG | LEU | 429 | 69.891 | 56.417 | −40.178 | 1.00 | 36.83 | | C |
| ATOM | 3379 | CD1 | LEU | 429 | 71.083 | 57.344 | −40.451 | 1.00 | 36.83 | | C |
| ATOM | 3380 | CD2 | LEU | 429 | 68.700 | 57.219 | −39.695 | 1.00 | 36.83 | | C |
| ATOM | 3381 | C | LEU | 429 | 71.181 | 53.805 | −40.893 | 1.00 | 36.83 | | C |
| ATOM | 3382 | O | LEU | 429 | 72.251 | 54.035 | −40.316 | 1.00 | 36.83 | | O |
| ATOM | 3383 | N | PHE | 430 | 70.434 | 52.733 | −40.639 | 1.00 | 36.83 | | N |
| ATOM | 3384 | CA | PHE | 430 | 70.802 | 51.771 | −39.603 | 1.00 | 36.83 | | C |
| ATOM | 3385 | CB | PHE | 430 | 69.700 | 50.720 | −39.430 | 1.00 | 36.83 | | C |
| ATOM | 3386 | CG | PHE | 430 | 69.777 | 49.961 | −38.132 | 1.00 | 36.83 | | C |
| ATOM | 3387 | CD1 | PHE | 430 | 69.227 | 50.490 | −36.968 | 1.00 | 36.83 | | C |
| ATOM | 3388 | CD2 | PHE | 430 | 70.414 | 48.726 | −38.066 | 1.00 | 36.83 | | C |
| ATOM | 3389 | CE1 | PHE | 430 | 69.314 | 49.805 | −35.756 | 1.00 | 36.83 | | C |
| ATOM | 3390 | CE2 | PHE | 430 | 70.505 | 48.032 | −36.862 | 1.00 | 36.83 | | C |
| ATOM | 3391 | CZ | PHE | 430 | 69.956 | 48.574 | −35.706 | 1.00 | 36.83 | | C |
| ATOM | 3392 | C | PHE | 430 | 72.118 | 51.079 | −39.942 | 1.00 | 36.83 | | C |
| ATOM | 3393 | O | PHE | 430 | 72.991 | 50.927 | −39.092 | 1.00 | 36.83 | | O |
| ATOM | 3394 | N | LEU | 431 | 72.270 | 50.613 | −41.158 | 1.00 | 36.83 | | N |
| ATOM | 3395 | CA | LEU | 431 | 73.510 | 50.003 | −41.558 | 1.00 | 36.83 | | C |
| ATOM | 3396 | CB | LEU | 431 | 73.390 | 49.502 | −42.977 | 1.00 | 36.83 | | C |
| ATOM | 3397 | CG | LEU | 431 | 73.169 | 48.035 | −43.283 | 1.00 | 36.83 | | C |
| ATOM | 3398 | CD1 | LEU | 431 | 72.355 | 47.301 | −42.271 | 1.00 | 36.83 | | C |
| ATOM | 3399 | CD2 | LEU | 431 | 72.588 | 47.891 | −44.653 | 1.00 | 36.83 | | C |
| ATOM | 3400 | C | LEU | 431 | 74.653 | 51.008 | −41.463 | 1.00 | 36.83 | | C |
| ATOM | 3401 | O | LEU | 431 | 75.728 | 50.684 | −41.071 | 1.00 | 36.83 | | O |
| ATOM | 3402 | N | TRP | 432 | 74.390 | 52.236 | −41.843 | 1.00 | 36.83 | | N |
| ATOM | 3403 | CA | TRP | 432 | 75.392 | 53.289 | −41.728 | 1.00 | 36.83 | | C |
| ATOM | 3404 | CB | TRP | 432 | 74.825 | 54.606 | −42.273 | 1.00 | 36.83 | | C |
| ATOM | 3405 | CG | TRP | 432 | 75.824 | 55.725 | −42.364 | 1.00 | 36.83 | | C |
| ATOM | 3406 | CD2 | TRP | 432 | 75.915 | 56.853 | −41.497 | 1.00 | 36.83 | | C |
| ATOM | 3407 | CE2 | TRP | 432 | 77.016 | 57.627 | −41.927 | 1.00 | 36.83 | | C |
| ATOM | 3408 | CE3 | TRP | 432 | 75.174 | 57.287 | −40.395 | 1.00 | 36.83 | | C |
| ATOM | 3409 | CD1 | TRP | 432 | 76.852 | 55.856 | −43.272 | 1.00 | 36.83 | | C |
| ATOM | 3410 | NE1 | TRP | 432 | 77.571 | 56.999 | −43.012 | 1.00 | 36.83 | | N |
| ATOM | 3411 | CZ2 | TRP | 432 | 77.388 | 58.804 | −41.289 | 1.00 | 36.83 | | C |
| ATOM | 3412 | CZ3 | TRP | 432 | 75.549 | 58.466 | −39.761 | 1.00 | 36.83 | | C |
| ATOM | 3413 | CH2 | TRP | 432 | 76.644 | 59.207 | −40.211 | 1.00 | 36.83 | | C |
| ATOM | 3414 | C | TRP | 432 | 75.789 | 53.453 | −40.250 | 1.00 | 36.83 | | C |
| ATOM | 3415 | O | TRP | 432 | 76.977 | 53.423 | −39.914 | 1.00 | 36.83 | | O |
| ATOM | 3416 | N | LEU | 433 | 74.799 | 53.619 | −39.370 | 1.00 | 36.83 | | N |
| ATOM | 3417 | CA | LEU | 433 | 75.075 | 53.765 | −37.938 | 1.00 | 36.83 | | C |
| ATOM | 3418 | CB | LEU | 433 | 73.776 | 53.838 | −37.116 | 1.00 | 36.83 | | C |
| ATOM | 3419 | CG | LEU | 433 | 72.812 | 55.027 | −37.234 | 1.00 | 36.83 | | C |
| ATOM | 3420 | CD1 | LEU | 433 | 71.608 | 54.773 | −36.342 | 1.00 | 36.83 | | C |
| ATOM | 3421 | CD2 | LEU | 433 | 73.499 | 56.334 | −36.828 | 1.00 | 36.83 | | C |
| ATOM | 3422 | C | LEU | 433 | 75.911 | 52.596 | −37.421 | 1.00 | 36.83 | | C |
| ATOM | 3423 | O | LEU | 433 | 76.755 | 52.766 | −36.542 | 1.00 | 36.83 | | O |
| ATOM | 3424 | N | VAL | 434 | 75.679 | 51.402 | −37.956 | 1.00 | 36.83 | | N |
| ATOM | 3425 | CA | VAL | 434 | 76.436 | 50.246 | −37.498 | 1.00 | 36.83 | | C |
| ATOM | 3426 | CB | VAL | 434 | 75.760 | 48.928 | −37.900 | 1.00 | 36.83 | | C |
| ATOM | 3427 | CG1 | VAL | 434 | 76.576 | 47.760 | −37.380 | 1.00 | 36.83 | | C |
| ATOM | 3428 | CG2 | VAL | 434 | 74.353 | 48.866 | −37.316 | 1.00 | 36.83 | | C |
| ATOM | 3429 | C | VAL | 434 | 77.889 | 50.234 | −37.976 | 1.00 | 36.83 | | C |
| ATOM | 3430 | O | VAL | 434 | 78.773 | 49.816 | −37.234 | 1.00 | 36.83 | | O |
| ATOM | 3431 | N | ILE | 435 | 78.155 | 50.677 | −39.202 | 1.00 | 36.83 | | N |
| ATOM | 3432 | CA | ILE | 435 | 79.540 | 50.690 | −39.665 | 1.00 | 36.83 | | C |
| ATOM | 3433 | CB | ILE | 435 | 79.672 | 50.854 | −41.200 | 1.00 | 36.83 | | C |
| ATOM | 3434 | CG2 | ILE | 435 | 78.933 | 49.718 | −41.898 | 1.00 | 36.83 | | C |
| ATOM | 3435 | CG1 | ILE | 435 | 79.160 | 52.222 | −41.640 | 1.00 | 36.83 | | C |
| ATOM | 3436 | CD1 | ILE | 435 | 79.402 | 52.515 | −43.117 | 1.00 | 36.83 | | C |
| ATOM | 3437 | C | ILE | 435 | 80.288 | 51.815 | −38.973 | 1.00 | 36.83 | | C |
| ATOM | 3438 | O | ILE | 435 | 81.434 | 51.649 | −38.588 | 1.00 | 36.83 | | O |
| ATOM | 3439 | N | LYS | 436 | 79.638 | 52.955 | −38.800 | 1.00 | 36.83 | | N |
| ATOM | 3440 | CA | LYS | 436 | 80.269 | 54.066 | −38.100 | 1.00 | 36.83 | | C |
| ATOM | 3441 | CB | LYS | 436 | 79.300 | 55.241 | −37.999 | 1.00 | 36.83 | | C |
| ATOM | 3442 | CG | LYS | 436 | 79.754 | 56.508 | −38.728 | 1.00 | 36.83 | | C |
| ATOM | 3443 | CD | LYS | 436 | 80.906 | 57.202 | −37.998 | 1.00 | 36.83 | | C |
| ATOM | 3444 | CE | LYS | 436 | 80.526 | 57.598 | −36.565 | 1.00 | 36.83 | | C |
| ATOM | 3445 | NZ | LYS | 436 | 81.617 | 58.321 | −35.824 | 1.00 | 36.83 | | N |
| ATOM | 3446 | C | LYS | 436 | 80.652 | 53.572 | −36.699 | 1.00 | 36.83 | | C |
| ATOM | 3447 | O | LYS | 436 | 81.721 | 53.895 | −36.194 | 1.00 | 36.83 | | O |
| ATOM | 3448 | N | ILE | 437 | 79.792 | 52.770 | −36.074 | 1.00 | 36.83 | | N |
| ATOM | 3449 | CA | ILE | 437 | 80.099 | 52.257 | −34.744 | 1.00 | 36.83 | | C |
| ATOM | 3450 | CB | ILE | 437 | 78.914 | 51.480 | −34.117 | 1.00 | 36.83 | | C |
| ATOM | 3451 | CG2 | ILE | 437 | 79.315 | 50.938 | −32.760 | 1.00 | 36.83 | | C |
| ATOM | 3452 | CG1 | ILE | 437 | 77.685 | 52.383 | −33.978 | 1.00 | 36.83 | | C |
| ATOM | 3453 | CD1 | ILE | 437 | 77.960 | 53.687 | −33.292 | 1.00 | 36.83 | | C |
| ATOM | 3454 | C | ILE | 437 | 81.284 | 51.300 | −34.819 | 1.00 | 36.83 | | C |
| ATOM | 3455 | O | ILE | 437 | 82.167 | 51.316 | −33.965 | 1.00 | 36.83 | | O |
| ATOM | 3456 | N | ASN | 438 | 81.303 | 50.473 | −35.855 | 1.00 | 36.83 | | N |
| ATOM | 3457 | CA | ASN | 438 | 82.371 | 49.500 | −36.009 | 1.00 | 36.83 | | C |
| ATOM | 3458 | CB | ASN | 438 | 82.050 | 48.522 | −37.147 | 1.00 | 36.83 | | C |
| ATOM | 3459 | CG | ASN | 438 | 81.170 | 47.346 | −36.693 | 1.00 | 36.83 | | C |
| ATOM | 3460 | OD1 | ASN | 438 | 81.366 | 46.783 | −35.614 | 1.00 | 36.83 | | O |
| ATOM | 3461 | ND2 | ASN | 438 | 80.212 | 46.968 | −37.528 | 1.00 | 36.83 | | N |
| ATOM | 3462 | C | ASN | 438 | 83.763 | 50.114 | −36.221 | 1.00 | 36.83 | | C |
| ATOM | 3463 | O | ASN | 438 | 84.735 | 49.625 | −35.654 | 1.00 | 36.83 | | O |
| ATOM | 3464 | N | ASN | 439 | 83.861 | 51.178 | −37.017 | 1.00 | 36.83 | | N |
| ATOM | 3465 | CA | ASN | 439 | 85.159 | 51.799 | −37.281 | 1.00 | 36.83 | | C |
| ATOM | 3466 | CB | ASN | 439 | 85.020 | 52.890 | −38.360 | 1.00 | 36.83 | | C |
| ATOM | 3467 | CG | ASN | 439 | 86.366 | 53.299 | −38.957 | 1.00 | 36.83 | | C |
| ATOM | 3468 | OD1 | ASN | 439 | 87.166 | 52.442 | −39.393 | 1.00 | 36.83 | | O |
| ATOM | 3469 | ND2 | ASN | 439 | 86.627 | 54.610 | −38.991 | 1.00 | 36.83 | | N |
| ATOM | 3470 | C | ASN | 439 | 85.789 | 52.378 | −36.001 | 1.00 | 36.83 | | C |
| ATOM | 3471 | O | ASN | 439 | 87.012 | 52.411 | −35.857 | 1.00 | 36.83 | | O |
| ATOM | 3472 | N | VAL | 440 | 84.948 | 52.826 | −35.076 | 1.00 | 36.83 | | N |
| ATOM | 3473 | CA | VAL | 440 | 85.412 | 53.383 | −33.811 | 1.00 | 36.83 | | C |
| ATOM | 3474 | CB | VAL | 440 | 84.293 | 54.204 | −33.107 | 1.00 | 36.83 | | C |
| ATOM | 3475 | CG1 | VAL | 440 | 84.717 | 54.568 | −31.704 | 1.00 | 36.83 | | C |
| ATOM | 3476 | CG2 | VAL | 440 | 83.972 | 55.462 | −33.904 | 1.00 | 36.83 | | C |
| ATOM | 3477 | C | VAL | 440 | 85.875 | 52.318 | −32.809 | 1.00 | 36.83 | | C |
| ATOM | 3478 | O | VAL | 440 | 86.976 | 52.408 | −32.273 | 1.00 | 36.83 | | O |
| ATOM | 3479 | N | LEU | 441 | 85.019 | 51.323 | −32.567 | 1.00 | 36.83 | | N |
| ATOM | 3480 | CA | LEU | 441 | 85.265 | 50.261 | −31.596 | 1.00 | 36.83 | | C |
| ATOM | 3481 | CB | LEU | 441 | 83.938 | 49.550 | −31.259 | 1.00 | 36.83 | | C |
| ATOM | 3482 | CG | LEU | 441 | 82.839 | 50.303 | −30.495 | 1.00 | 36.83 | | C |
| ATOM | 3483 | CD1 | LEU | 441 | 81.557 | 49.460 | −30.420 | 1.00 | 36.83 | | C |
| ATOM | 3484 | CD2 | LEU | 441 | 83.328 | 50.603 | −29.096 | 1.00 | 36.83 | | C |
| ATOM | 3485 | C | LEU | 441 | 86.283 | 49.219 | −32.011 | 1.00 | 36.83 | | C |
| ATOM | 3486 | O | LEU | 441 | 86.813 | 48.489 | −31.170 | 1.00 | 36.83 | | O |
| ATOM | 3487 | N | CYS | 442 | 86.537 | 49.141 | −33.309 | 1.00 | 36.83 | | N |
| ATOM | 3488 | CA | CYS | 442 | 87.478 | 48.172 | −33.867 | 1.00 | 36.83 | | C |
| ATOM | 3489 | CB | CYS | 442 | 86.788 | 47.398 | −34.995 | 1.00 | 36.83 | | C |
| ATOM | 3490 | SG | CYS | 442 | 86.948 | 45.599 | −34.908 | 1.00 | 36.83 | | S |
| ATOM | 3491 | C | CYS | 442 | 88.685 | 48.953 | −34.423 | 1.00 | 36.83 | | C |
| ATOM | 3492 | O | CYS | 442 | 88.626 | 49.493 | −35.540 | 1.00 | 36.83 | | O |
| ATOM | 3493 | N | GLN | 443 | 89.766 | 49.010 | −33.643 | 1.00 | 36.83 | | N |
| ATOM | 3494 | CA | GLN | 443 | 90.964 | 49.743 | −34.035 | 1.00 | 36.83 | | C |
| ATOM | 3495 | CB | GLN | 443 | 91.285 | 50.853 | −33.026 | 1.00 | 36.83 | | C |
| ATOM | 3496 | CG | GLN | 443 | 90.202 | 51.902 | −32.822 | 1.00 | 36.83 | | C |
| ATOM | 3497 | CD | GLN | 443 | 89.901 | 52.693 | −34.067 | 1.00 | 36.83 | | C |
| ATOM | 3498 | OE1 | GLN | 443 | 89.488 | 53.843 | −33.984 | 1.00 | 36.83 | | O |
| ATOM | 3499 | NE2 | GLN | 443 | 90.087 | 52.077 | −35.234 | 1.00 | 36.83 | | N |
| ATOM | 3500 | C | GLN | 443 | 92.191 | 48.869 | −34.141 | 1.00 | 36.83 | | C |
| ATOM | 3501 | O | GLN | 443 | 93.268 | 49.373 | −34.482 | 1.00 | 36.83 | | O |
| ATOM | 3502 | N | GLU | 444 | 92.056 | 47.578 | −33.842 | 1.00 | 36.83 | | N |
| ATOM | 3503 | CA | GLU | 444 | 93.211 | 46.694 | −33.914 | 1.00 | 36.83 | | C |
| ATOM | 3504 | CB | GLU | 444 | 94.026 | 46.793 | −32.616 | 1.00 | 36.83 | | C |
| ATOM | 3505 | CG | GLU | 444 | 95.326 | 45.964 | −32.624 | 1.00 | 36.83 | | C |
| ATOM | 3506 | CD | GLU | 444 | 96.182 | 46.252 | −33.852 | 1.00 | 36.83 | | C |
| ATOM | 3507 | OE1 | GLU | 444 | 96.273 | 47.448 | −34.235 | 1.00 | 36.83 | | O |
| ATOM | 3508 | OE2 | GLU | 444 | 96.759 | 45.295 | −34.433 | 1.00 | 36.83 | | O |
| ATOM | 3509 | C | GLU | 444 | 92.808 | 45.249 | −34.165 | 1.00 | 36.83 | | C |
| ATOM | 3510 | O | GLU | 444 | 91.701 | 44.832 | −33.821 | 1.00 | 36.83 | | O |
| ATOM | 3511 | N | ARG | 445 | 93.714 | 44.499 | −34.784 | 1.00 | 36.83 | | N |
| ATOM | 3512 | CA | ARG | 445 | 93.488 | 43.093 | −35.098 | 1.00 | 36.83 | | C |
| ATOM | 3513 | CB | ARG | 445 | 94.703 | 42.519 | −35.838 | 1.00 | 36.83 | | C |
| ATOM | 3514 | CG | ARG | 445 | 94.416 | 41.998 | −37.249 | 1.00 | 36.83 | | C |
| ATOM | 3515 | CD | ARG | 445 | 95.667 | 41.328 | −37.855 | 1.00 | 36.83 | | C |
| ATOM | 3516 | NE | ARG | 445 | 95.362 | 40.465 | −39.003 | 1.00 | 36.83 | | N |
| ATOM | 3517 | CZ | ARG | 445 | 94.524 | 39.428 | −38.951 | 1.00 | 36.83 | | C |
| ATOM | 3518 | NH1 | ARG | 445 | 93.907 | 39.130 | −37.809 | 1.00 | 36.83 | | N |
| ATOM | 3519 | NH2 | ARG | 445 | 94.307 | 38.683 | −40.031 | 1.00 | 36.83 | | N |
| ATOM | 3520 | C | ARG | 445 | 93.296 | 42.350 | −33.787 | 1.00 | 36.83 | | C |
| ATOM | 3521 | O | ARG | 445 | 94.156 | 42.410 | −32.914 | 1.00 | 36.83 | | O |
| ATOM | 3522 | N | LYS | 446 | 92.175 | 41.659 | −33.637 | 1.00 | 36.83 | | N |
| ATOM | 3523 | CA | LYS | 446 | 91.939 | 40.924 | −32.409 | 1.00 | 36.83 | | C |
| ATOM | 3524 | CB | LYS | 446 | 90.484 | 40.434 | −32.306 | 1.00 | 36.83 | | C |
| ATOM | 3525 | CG | LYS | 446 | 90.115 | 39.300 | −33.231 | 1.00 | 36.83 | | C |
| ATOM | 3526 | CD | LYS | 446 | 89.882 | 39.782 | −34.665 | 1.00 | 36.83 | | C |
| ATOM | 3527 | CE | LYS | 446 | 89.231 | 38.687 | −35.524 | 1.00 | 36.83 | | C |
| ATOM | 3528 | NZ | LYS | 446 | 89.087 | 39.053 | −36.979 | 1.00 | 36.83 | | N |
| ATOM | 3529 | C | LYS | 446 | 92.868 | 39.726 | −32.376 | 1.00 | 36.83 | | C |
| ATOM | 3530 | O | LYS | 446 | 93.588 | 39.467 | −33.339 | 1.00 | 36.83 | | O |
| ATOM | 3531 | N | ALA | 447 | 92.849 | 39.010 | −31.257 | 1.00 | 36.83 | | N |
| ATOM | 3532 | CA | ALA | 447 | 93.669 | 37.833 | −31.083 | 1.00 | 36.83 | | C |
| ATOM | 3533 | CB | ALA | 447 | 94.629 | 38.031 | −29.905 | 1.00 | 36.83 | | C |
| ATOM | 3534 | C | ALA | 447 | 92.683 | 36.725 | −30.797 | 1.00 | 36.83 | | C |
| ATOM | 3535 | O | ALA | 447 | 92.711 | 35.674 | −31.418 | 1.00 | 36.83 | | O |
| ATOM | 3536 | N | TYR | 448 | 91.801 | 36.981 | −29.842 | 1.00 | 36.83 | | N |
| ATOM | 3537 | CA | TYR | 448 | 90.753 | 36.031 | −29.480 | 1.00 | 36.83 | | C |
| ATOM | 3538 | CB | TYR | 448 | 91.159 | 35.304 | −28.203 | 1.00 | 36.83 | | C |
| ATOM | 3539 | CG | TYR | 448 | 92.438 | 34.535 | −28.386 | 1.00 | 36.83 | | C |
| ATOM | 3540 | CD1 | TYR | 448 | 92.606 | 33.707 | −29.489 | 1.00 | 36.83 | | C |
| ATOM | 3541 | CE1 | TYR | 448 | 93.781 | 32.987 | −29.684 | 1.00 | 36.83 | | C |
| ATOM | 3542 | CD2 | TYR | 448 | 93.483 | 34.631 | −27.467 | 1.00 | 36.83 | | C |
| ATOM | 3543 | CE2 | TYR | 448 | 94.678 | 33.913 | −27.653 | 1.00 | 36.83 | | C |
| ATOM | 3544 | CZ | TYR | 448 | 94.816 | 33.090 | −28.767 | 1.00 | 36.83 | | C |
| ATOM | 3545 | OH | TYR | 448 | 95.976 | 32.359 | −28.986 | 1.00 | 36.83 | | O |
| ATOM | 3546 | C | TYR | 448 | 89.435 | 36.786 | −29.286 | 1.00 | 36.83 | | C |
| ATOM | 3547 | O | TYR | 448 | 89.421 | 38.021 | −29.316 | 1.00 | 36.83 | | O |
| ATOM | 3548 | N | PHE | 449 | 88.326 | 36.064 | −29.118 | 1.00 | 36.83 | | N |
| ATOM | 3549 | CA | PHE | 449 | 87.048 | 36.726 | −28.883 | 1.00 | 36.83 | | C |
| ATOM | 3550 | CB | PHE | 449 | 86.528 | 37.407 | −30.153 | 1.00 | 36.83 | | C |
| ATOM | 3551 | CG | PHE | 449 | 85.839 | 36.485 | −31.117 | 1.00 | 36.83 | | C |
| ATOM | 3552 | CD1 | PHE | 449 | 86.511 | 35.991 | −32.227 | 1.00 | 36.83 | | C |
| ATOM | 3553 | CD2 | PHE | 449 | 84.511 | 36.118 | −30.927 | 1.00 | 36.83 | | C |
| ATOM | 3554 | CE1 | PHE | 449 | 85.868 | 35.148 | −33.133 | 1.00 | 36.83 | | C |
| ATOM | 3555 | CE2 | PHE | 449 | 83.871 | 35.275 | −31.829 | 1.00 | 36.83 | | C |
| ATOM | 3556 | CZ | PHE | 449 | 84.550 | 34.794 | −32.928 | 1.00 | 36.83 | | C |
| ATOM | 3557 | C | PHE | 449 | 85.930 | 35.862 | −28.304 | 1.00 | 36.83 | | C |
| ATOM | 3558 | O | PHE | 449 | 85.918 | 34.629 | −28.439 | 1.00 | 36.83 | | O |
| ATOM | 3559 | N | ILE | 450 | 85.000 | 36.544 | −27.646 | 1.00 | 36.83 | | N |
| ATOM | 3560 | CA | ILE | 450 | 83.820 | 35.927 | −27.055 | 1.00 | 36.83 | | C |
| ATOM | 3561 | CB | ILE | 450 | 83.675 | 36.263 | −25.551 | 1.00 | 36.83 | | C |
| ATOM | 3562 | CG2 | ILE | 450 | 82.436 | 35.591 | −24.987 | 1.00 | 36.83 | | C |
| ATOM | 3563 | CG1 | ILE | 450 | 84.902 | 35.782 | −24.781 | 1.00 | 36.83 | | C |
| ATOM | 3564 | CD1 | ILE | 450 | 84.842 | 36.059 | −23.286 | 1.00 | 36.83 | | C |
| ATOM | 3565 | C | ILE | 450 | 82.657 | 36.564 | −27.809 | 1.00 | 36.83 | | C |
| ATOM | 3566 | O | ILE | 450 | 82.461 | 37.788 | −27.746 | 1.00 | 36.83 | | O |
| ATOM | 3567 | N | GLY | 451 | 81.912 | 35.749 | −28.553 | 1.00 | 36.83 | | N |
| ATOM | 3568 | CA | GLY | 451 | 80.774 | 36.274 | −29.290 | 1.00 | 36.83 | | C |
| ATOM | 3569 | C | GLY | 451 | 79.497 | 36.234 | −28.465 | 1.00 | 36.83 | | C |
| ATOM | 3570 | O | GLY | 451 | 79.235 | 35.241 | −27.782 | 1.00 | 36.83 | | O |
| ATOM | 3571 | N | VAL | 452 | 78.715 | 37.311 | −28.516 | 1.00 | 36.83 | | N |
| ATOM | 3572 | CA | VAL | 452 | 77.451 | 37.390 | −27.782 | 1.00 | 36.83 | | C |
| ATOM | 3573 | CB | VAL | 452 | 77.429 | 38.601 | −26.812 | 1.00 | 36.83 | | C |
| ATOM | 3574 | CG1 | VAL | 452 | 76.187 | 38.544 | −25.934 | 1.00 | 36.83 | | C |
| ATOM | 3575 | CG2 | VAL | 452 | 78.676 | 38.600 | −25.936 | 1.00 | 36.83 | | C |
| ATOM | 3576 | C | VAL | 452 | 76.297 | 37.527 | −28.772 | 1.00 | 36.83 | | C |
| ATOM | 3577 | O | VAL | 452 | 76.199 | 38.532 | −29.468 | 1.00 | 36.83 | | O |
| ATOM | 3578 | N | LEU | 453 | 75.431 | 36.511 | −28.828 | 1.00 | 36.83 | | N |
| ATOM | 3579 | CA | LEU | 453 | 74.281 | 36.490 | −29.744 | 1.00 | 36.83 | | C |
| ATOM | 3580 | CB | LEU | 453 | 74.085 | 35.085 | −30.320 | 1.00 | 36.83 | | C |
| ATOM | 3581 | CG | LEU | 453 | 72.969 | 34.893 | −31.350 | 1.00 | 36.83 | | C |
| ATOM | 3582 | CD1 | LEU | 453 | 73.368 | 35.561 | −32.641 | 1.00 | 36.83 | | C |
| ATOM | 3583 | CD2 | LEU | 453 | 72.725 | 33.418 | −31.599 | 1.00 | 36.83 | | C |
| ATOM | 3584 | C | LEU | 453 | 72.961 | 36.925 | −29.094 | 1.00 | 36.83 | | C |
| ATOM | 3585 | O | LEU | 453 | 72.512 | 36.305 | −28.128 | 1.00 | 36.83 | | O |
| ATOM | 3586 | N | ASP | 454 | 72.349 | 37.969 | −29.658 | 1.00 | 36.83 | | N |
| ATOM | 3587 | CA | ASP | 454 | 71.094 | 38.531 | −29.177 | 1.00 | 36.83 | | C |
| ATOM | 3588 | CB | ASP | 454 | 71.384 | 39.857 | −28.470 | 1.00 | 36.83 | | C |
| ATOM | 3589 | CG | ASP | 454 | 70.123 | 40.560 | −27.991 | 1.00 | 36.83 | | C |
| ATOM | 3590 | OD1 | ASP | 454 | 69.117 | 39.874 | −27.730 | 1.00 | 36.83 | | O |
| ATOM | 3591 | OD2 | ASP | 454 | 70.134 | 41.798 | −27.855 | 1.00 | 36.83 | | O |
| ATOM | 3592 | C | ASP | 454 | 70.118 | 38.743 | −30.348 | 1.00 | 36.83 | | C |
| ATOM | 3593 | O | ASP | 454 | 70.008 | 39.845 | −30.883 | 1.00 | 36.83 | | O |
| ATOM | 3594 | N | ILE | 455 | 69.420 | 37.682 | −30.747 | 1.00 | 36.83 | | N |
| ATOM | 3595 | CA | ILE | 455 | 68.472 | 37.751 | −31.863 | 1.00 | 36.83 | | C |
| ATOM | 3596 | CB | ILE | 455 | 68.335 | 36.387 | −32.608 | 1.00 | 36.83 | | C |
| ATOM | 3597 | CG2 | ILE | 455 | 69.700 | 35.875 | −33.039 | 1.00 | 36.83 | | C |
| ATOM | 3598 | CG1 | ILE | 455 | 67.645 | 35.366 | −31.700 | 1.00 | 36.83 | | C |
| ATOM | 3599 | CD1 | ILE | 455 | 67.364 | 34.045 | −32.367 | 1.00 | 36.83 | | C |
| ATOM | 3600 | C | ILE | 455 | 67.058 | 38.143 | −31.444 | 1.00 | 36.83 | | C |
| ATOM | 3601 | O | ILE | 455 | 66.729 | 38.136 | −30.262 | 1.00 | 36.83 | | O |
| ATOM | 3602 | N | SER | 456 | 66.227 | 38.482 | −32.425 | 1.00 | 36.83 | | N |
| ATOM | 3603 | CA | SER | 456 | 64.833 | 38.817 | −32.141 | 1.00 | 36.83 | | C |
| ATOM | 3604 | CB | SER | 456 | 64.146 | 39.418 | −33.368 | 1.00 | 36.83 | | C |
| ATOM | 3605 | OG | SER | 456 | 64.660 | 40.701 | −33.673 | 1.00 | 36.83 | | O |
| ATOM | 3606 | C | SER | 456 | 64.190 | 37.480 | −31.799 | 1.00 | 36.83 | | C |
| ATOM | 3607 | O | SER | 456 | 64.308 | 36.528 | −32.563 | 1.00 | 36.83 | | O |
| ATOM | 3608 | N | GLY | 457 | 63.534 | 37.402 | −30.651 | 1.00 | 36.83 | | N |
| ATOM | 3609 | CA | GLY | 457 | 62.918 | 36.153 | −30.236 | 1.00 | 36.83 | | C |
| ATOM | 3610 | C | GLY | 457 | 61.703 | 35.667 | −31.013 | 1.00 | 36.83 | | C |
| ATOM | 3611 | O | GLY | 457 | 61.004 | 36.425 | −31.677 | 1.00 | 36.83 | | O |
| ATOM | 3612 | N | PHE | 458 | 61.464 | 34.369 | −30.916 | 1.00 | 36.83 | | N |
| ATOM | 3613 | CA | PHE | 458 | 60.343 | 33.717 | −31.569 | 1.00 | 36.83 | | C |
| ATOM | 3614 | CB | PHE | 458 | 60.252 | 32.278 | −31.050 | 1.00 | 36.83 | | C |
| ATOM | 3615 | CG | PHE | 458 | 59.206 | 31.445 | −31.724 | 1.00 | 36.83 | | C |
| ATOM | 3616 | CD1 | PHE | 458 | 57.901 | 31.429 | −31.252 | 1.00 | 36.83 | | C |
| ATOM | 3617 | CD2 | PHE | 458 | 59.533 | 30.662 | −32.831 | 1.00 | 36.83 | | C |
| ATOM | 3618 | CE1 | PHE | 458 | 56.932 | 30.646 | −31.866 | 1.00 | 36.83 | | C |
| ATOM | 3619 | CE2 | PHE | 458 | 58.569 | 29.876 | −33.451 | 1.00 | 36.83 | | C |
| ATOM | 3620 | CZ | PHE | 458 | 57.262 | 29.871 | −32.962 | 1.00 | 36.83 | | C |
| ATOM | 3621 | C | PHE | 458 | 59.083 | 34.510 | −31.224 | 1.00 | 36.83 | | C |
| ATOM | 3622 | O | PHE | 458 | 58.872 | 34.882 | −30.066 | 1.00 | 36.83 | | O |
| ATOM | 3623 | N | GLU | 459 | 58.259 | 34.790 | −32.225 | 1.00 | 36.83 | | N |
| ATOM | 3624 | CA | GLU | 459 | 57.041 | 35.557 | −31.984 | 1.00 | 36.83 | | C |
| ATOM | 3625 | CB | GLU | 459 | 57.309 | 37.052 | −32.200 | 1.00 | 36.83 | | C |
| ATOM | 3626 | CG | GLU | 459 | 58.015 | 37.406 | −33.510 | 1.00 | 36.83 | | C |
| ATOM | 3627 | CD | GLU | 459 | 58.134 | 38.918 | −33.715 | 1.00 | 36.83 | | C |
| ATOM | 3628 | OE1 | GLU | 459 | 58.520 | 39.620 | −32.762 | 1.00 | 36.83 | | O |
| ATOM | 3629 | OE2 | GLU | 459 | 57.848 | 39.403 | −34.826 | 1.00 | 36.83 | | O |
| ATOM | 3630 | C | GLU | 459 | 55.805 | 35.162 | −32.785 | 1.00 | 36.83 | | C |
| ATOM | 3631 | O | GLU | 459 | 55.901 | 34.752 | −33.936 | 1.00 | 36.83 | | O |
| ATOM | 3632 | N | ILE | 460 | 54.641 | 35.300 | −32.158 | 1.00 | 36.83 | | N |
| ATOM | 3633 | CA | ILE | 460 | 53.388 | 34.998 | −32.823 | 1.00 | 36.83 | | C |
| ATOM | 3634 | CB | ILE | 460 | 52.750 | 33.683 | −32.317 | 1.00 | 36.83 | | C |
| ATOM | 3635 | CG2 | ILE | 460 | 51.510 | 33.366 | −33.141 | 1.00 | 36.83 | | C |
| ATOM | 3636 | CG1 | ILE | 460 | 53.741 | 32.528 | −32.433 | 1.00 | 36.83 | | C |
| ATOM | 3637 | CD1 | ILE | 460 | 53.200 | 31.214 | −31.915 | 1.00 | 36.83 | | C |
| ATOM | 3638 | C | ILE | 460 | 52.380 | 36.124 | −32.589 | 1.00 | 36.83 | | C |
| ATOM | 3639 | O | ILE | 460 | 52.020 | 36.419 | −31.457 | 1.00 | 36.83 | | O |
| ATOM | 3640 | N | PHE | 461 | 51.945 | 36.745 | −33.675 | 1.00 | 36.83 | | N |
| ATOM | 3641 | CA | PHE | 461 | 50.959 | 37.820 | −33.642 | 1.00 | 36.83 | | C |
| ATOM | 3642 | CB | PHE | 461 | 51.495 | 39.055 | −34.359 | 1.00 | 36.83 | | C |
| ATOM | 3643 | CG | PHE | 461 | 52.752 | 39.612 | −33.767 | 1.00 | 36.83 | | C |
| ATOM | 3644 | CD1 | PHE | 461 | 52.784 | 40.054 | −32.454 | 1.00 | 36.83 | | C |
| ATOM | 3645 | CD2 | PHE | 461 | 53.896 | 39.735 | −34.540 | 1.00 | 36.83 | | C |
| ATOM | 3646 | CE1 | PHE | 461 | 53.947 | 40.617 | −31.921 | 1.00 | 36.83 | | C |
| ATOM | 3647 | CE2 | PHE | 461 | 55.057 | 40.297 | −34.014 | 1.00 | 36.83 | | C |
| ATOM | 3648 | CZ | PHE | 461 | 55.082 | 40.738 | −32.704 | 1.00 | 36.83 | | C |
| ATOM | 3649 | C | PHE | 461 | 49.715 | 37.342 | −34.395 | 1.00 | 36.83 | | C |
| ATOM | 3650 | O | PHE | 461 | 49.693 | 36.228 | −34.919 | 1.00 | 36.83 | | O |
| ATOM | 3651 | N | LYS | 462 | 48.698 | 38.202 | −34.464 | 1.00 | 36.83 | | N |
| ATOM | 3652 | CA | LYS | 462 | 47.467 | 37.884 | −35.180 | 1.00 | 36.83 | | C |
| ATOM | 3653 | CB | LYS | 462 | 46.442 | 39.016 | −35.048 | 1.00 | 36.83 | | C |
| ATOM | 3654 | CG | LYS | 462 | 45.819 | 39.148 | −33.669 | 1.00 | 36.83 | | C |
| ATOM | 3655 | CD | LYS | 462 | 45.580 | 40.623 | −33.308 | 1.00 | 36.83 | | C |
| ATOM | 3656 | CE | LYS | 462 | 44.852 | 41.405 | −34.422 | 1.00 | 36.83 | | C |
| ATOM | 3657 | NZ | LYS | 462 | 45.728 | 41.753 | −35.610 | 1.00 | 36.83 | | N |
| ATOM | 3658 | C | LYS | 462 | 47.840 | 37.712 | −36.638 | 1.00 | 36.83 | | C |
| ATOM | 3659 | O | LYS | 462 | 47.379 | 36.793 | −37.296 | 1.00 | 36.83 | | O |
| ATOM | 3660 | N | VAL | 463 | 48.666 | 38.622 | −37.136 | 1.00 | 36.83 | | N |
| ATOM | 3661 | CA | VAL | 463 | 49.131 | 38.564 | −38.516 | 1.00 | 36.83 | | C |
| ATOM | 3662 | CB | VAL | 463 | 48.806 | 39.869 | −39.309 | 1.00 | 36.83 | | C |
| ATOM | 3663 | CG1 | VAL | 463 | 49.024 | 39.644 | −40.784 | 1.00 | 36.83 | | C |
| ATOM | 3664 | CG2 | VAL | 463 | 47.376 | 40.302 | −39.062 | 1.00 | 36.83 | | C |
| ATOM | 3665 | C | VAL | 463 | 50.652 | 38.387 | −38.495 | 1.00 | 36.83 | | C |
| ATOM | 3666 | O | VAL | 463 | 51.375 | 39.224 | −37.939 | 1.00 | 36.83 | | O |
| ATOM | 3667 | N | ASN | 464 | 51.117 | 37.287 | −39.079 | 1.00 | 36.83 | | N |
| ATOM | 3668 | CA | ASN | 464 | 52.540 | 36.986 | −39.184 | 1.00 | 36.83 | | C |
| ATOM | 3669 | CB | ASN | 464 | 52.844 | 35.599 | −38.623 | 1.00 | 36.83 | | C |
| ATOM | 3670 | CG | ASN | 464 | 52.426 | 35.461 | −37.185 | 1.00 | 36.83 | | C |
| ATOM | 3671 | OD1 | ASN | 464 | 52.874 | 36.218 | −36.336 | 1.00 | 36.83 | | O |
| ATOM | 3672 | ND2 | ASN | 464 | 51.561 | 34.501 | −36.903 | 1.00 | 36.83 | | N |
| ATOM | 3673 | C | ASN | 464 | 52.871 | 37.022 | −40.663 | 1.00 | 36.83 | | C |
| ATOM | 3674 | O | ASN | 464 | 52.253 | 36.327 | −41.467 | 1.00 | 36.83 | | O |
| ATOM | 3675 | N | SER | 465 | 53.836 | 37.845 | −41.027 | 1.00 | 36.83 | | N |
| ATOM | 3676 | CA | SER | 465 | 54.224 | 37.974 | −42.420 | 1.00 | 36.83 | | C |
| ATOM | 3677 | CB | SER | 465 | 54.124 | 39.448 | −42.832 | 1.00 | 36.83 | | C |
| ATOM | 3678 | OG | SER | 465 | 54.317 | 39.615 | −44.220 | 1.00 | 36.83 | | O |
| ATOM | 3679 | C | SER | 465 | 55.645 | 37.421 | −42.651 | 1.00 | 36.83 | | C |
| ATOM | 3680 | O | SER | 465 | 56.154 | 36.651 | −41.846 | 1.00 | 36.83 | | O |
| ATOM | 3681 | N | PHE | 466 | 56.259 | 37.823 | −43.758 | 1.00 | 36.83 | | N |
| ATOM | 3682 | CA | PHE | 466 | 57.588 | 37.371 | −44.134 | 1.00 | 36.83 | | C |
| ATOM | 3683 | CB | PHE | 466 | 58.019 | 38.041 | −45.448 | 1.00 | 36.83 | | C |
| ATOM | 3684 | CG | PHE | 466 | 59.355 | 37.578 | −45.957 | 1.00 | 36.83 | | C |
| ATOM | 3685 | CD1 | PHE | 466 | 59.598 | 36.227 | −46.198 | 1.00 | 36.83 | | C |
| ATOM | 3686 | CD2 | PHE | 466 | 60.368 | 38.496 | −46.223 | 1.00 | 36.83 | | C |
| ATOM | 3687 | CE1 | PHE | 466 | 60.829 | 35.804 | −46.699 | 1.00 | 36.83 | | C |
| ATOM | 3688 | CE2 | PHE | 466 | 61.604 | 38.077 | −46.726 | 1.00 | 36.83 | | C |
| ATOM | 3689 | CZ | PHE | 466 | 61.830 | 36.730 | −46.963 | 1.00 | 36.83 | | C |
| ATOM | 3690 | C | PHE | 466 | 58.625 | 37.629 | −43.048 | 1.00 | 36.83 | | C |
| ATOM | 3691 | O | PHE | 466 | 59.504 | 36.807 | −42.830 | 1.00 | 36.83 | | O |
| ATOM | 3692 | N | GLU | 467 | 58.510 | 38.772 | −42.381 | 1.00 | 36.83 | | N |
| ATOM | 3693 | CA | GLU | 467 | 59.417 | 39.134 | −41.298 | 1.00 | 36.83 | | C |
| ATOM | 3694 | CB | GLU | 467 | 59.011 | 40.497 | −40.712 | 1.00 | 36.83 | | C |
| ATOM | 3695 | CG | GLU | 467 | 59.346 | 41.686 | −41.616 | 1.00 | 36.83 | | C |
| ATOM | 3696 | CD | GLU | 467 | 58.269 | 42.015 | −42.649 | 1.00 | 36.83 | | C |
| ATOM | 3697 | OE1 | GLU | 467 | 57.386 | 41.159 | −42.926 | 1.00 | 36.83 | | O |
| ATOM | 3698 | OE2 | GLU | 467 | 58.324 | 43.145 | −43.192 | 1.00 | 36.83 | | O |
| ATOM | 3699 | C | GLU | 467 | 59.413 | 38.059 | −40.195 | 1.00 | 36.83 | | C |
| ATOM | 3700 | O | GLU | 467 | 60.475 | 37.596 | −39.765 | 1.00 | 36.83 | | O |
| ATOM | 3701 | N | GLN | 468 | 58.213 | 37.667 | −39.762 | 1.00 | 36.83 | | N |
| ATOM | 3702 | CA | GLN | 468 | 58.020 | 36.656 | −38.729 | 1.00 | 36.83 | | C |
| ATOM | 3703 | CB | GLN | 468 | 56.529 | 36.497 | −38.402 | 1.00 | 36.83 | | C |
| ATOM | 3704 | CG | GLN | 468 | 55.946 | 37.577 | −37.503 | 1.00 | 36.83 | | C |
| ATOM | 3705 | CD | GLN | 468 | 56.009 | 38.963 | −38.111 | 1.00 | 36.83 | | C |
| ATOM | 3706 | OE1 | GLN | 468 | 55.456 | 39.217 | −39.176 | 1.00 | 36.83 | | O |
| ATOM | 3707 | NE2 | GLN | 468 | 56.686 | 39.868 | −37.432 | 1.00 | 36.83 | | N |
| ATOM | 3708 | C | GLN | 468 | 58.593 | 35.294 | −39.116 | 1.00 | 36.83 | | C |
| ATOM | 3709 | O | GLN | 468 | 59.136 | 34.591 | −38.271 | 1.00 | 36.83 | | O |
| ATOM | 3710 | N | LEU | 469 | 58.447 | 34.908 | −40.381 | 1.00 | 36.83 | | N |
| ATOM | 3711 | CA | LEU | 469 | 58.992 | 33.632 | −40.846 | 1.00 | 36.83 | | C |
| ATOM | 3712 | CB | LEU | 469 | 58.621 | 33.380 | −42.309 | 1.00 | 36.83 | | C |
| ATOM | 3713 | CG | LEU | 469 | 59.250 | 32.108 | −42.880 | 1.00 | 36.83 | | C |
| ATOM | 3714 | CD1 | LEU | 469 | 58.763 | 30.935 | −42.081 | 1.00 | 36.83 | | C |
| ATOM | 3715 | CD2 | LEU | 469 | 58.903 | 31.939 | −44.351 | 1.00 | 36.83 | | C |
| ATOM | 3716 | C | LEU | 469 | 60.523 | 33.661 | −40.704 | 1.00 | 36.83 | | C |
| ATOM | 3717 | O | LEU | 469 | 61.127 | 32.736 | −40.182 | 1.00 | 36.83 | | O |
| ATOM | 3718 | N | CYS | 470 | 61.141 | 34.739 | −41.165 | 1.00 | 36.83 | | N |
| ATOM | 3719 | CA | CYS | 470 | 62.586 | 34.888 | −41.063 | 1.00 | 36.83 | | C |
| ATOM | 3720 | CB | CYS | 470 | 63.022 | 36.202 | −41.710 | 1.00 | 36.83 | | C |
| ATOM | 3721 | SG | CYS | 470 | 62.819 | 36.239 | −43.490 | 1.00 | 36.83 | | S |
| ATOM | 3722 | C | CYS | 470 | 63.019 | 34.856 | −39.598 | 1.00 | 36.83 | | C |
| ATOM | 3723 | O | CYS | 470 | 64.008 | 34.233 | −39.253 | 1.00 | 36.83 | | O |
| ATOM | 3724 | N | ILE | 471 | 62.262 | 35.524 | −38.736 | 1.00 | 36.83 | | N |
| ATOM | 3725 | CA | ILE | 471 | 62.581 | 35.545 | −37.315 | 1.00 | 36.83 | | C |
| ATOM | 3726 | CB | ILE | 471 | 61.648 | 36.511 | −36.540 | 1.00 | 36.83 | | C |
| ATOM | 3727 | CG2 | ILE | 471 | 61.851 | 36.354 | −35.006 | 1.00 | 36.83 | | C |
| ATOM | 3728 | CG1 | ILE | 471 | 61.883 | 37.946 | −37.014 | 1.00 | 36.83 | | C |
| ATOM | 3729 | CD1 | ILE | 471 | 60.876 | 38.922 | −36.459 | 1.00 | 36.83 | | C |
| ATOM | 3730 | C | ILE | 471 | 62.451 | 34.156 | −36.706 | 1.00 | 36.83 | | C |
| ATOM | 3731 | O | ILE | 471 | 63.388 | 33.657 | −36.098 | 1.00 | 36.83 | | O |
| ATOM | 3732 | N | ASN | 472 | 61.292 | 33.531 | −36.881 | 1.00 | 36.83 | | N |
| ATOM | 3733 | CA | ASN | 472 | 61.037 | 32.209 | −36.306 | 1.00 | 36.83 | | C |
| ATOM | 3734 | CB | ASN | 472 | 59.561 | 31.829 | −36.504 | 1.00 | 36.83 | | C |
| ATOM | 3735 | CG | ASN | 472 | 58.625 | 32.617 | −35.578 | 1.00 | 36.83 | | C |
| ATOM | 3736 | OD1 | ASN | 472 | 57.392 | 32.568 | −35.712 | 1.00 | 36.83 | | O |
| ATOM | 3737 | ND2 | ASN | 472 | 59.207 | 33.337 | −34.634 | 1.00 | 36.83 | | N |
| ATOM | 3738 | C | ASN | 472 | 61.964 | 31.118 | −36.832 | 1.00 | 36.83 | | C |
| ATOM | 3739 | O | ASN | 472 | 62.256 | 30.150 | −36.130 | 1.00 | 36.83 | | O |
| ATOM | 3740 | N | TYR | 473 | 62.417 | 31.293 | −38.072 | 1.00 | 36.83 | | N |
| ATOM | 3741 | CA | TYR | 473 | 63.340 | 30.378 | −38.729 | 1.00 | 36.83 | | C |
| ATOM | 3742 | CB | TYR | 473 | 63.462 | 30.761 | −40.208 | 1.00 | 36.83 | | C |
| ATOM | 3743 | CG | TYR | 473 | 64.707 | 30.263 | −40.920 | 1.00 | 36.83 | | C |
| ATOM | 3744 | CD1 | TYR | 473 | 64.973 | 28.895 | −41.053 | 1.00 | 36.83 | | C |
| ATOM | 3745 | CE1 | TYR | 473 | 66.085 | 28.450 | −41.767 | 1.00 | 36.83 | | C |
| ATOM | 3746 | CD2 | TYR | 473 | 65.590 | 31.166 | −41.517 | 1.00 | 36.83 | | C |
| ATOM | 3747 | CE2 | TYR | 473 | 66.699 | 30.727 | −42.236 | 1.00 | 36.83 | | C |
| ATOM | 3748 | CZ | TYR | 473 | 66.939 | 29.376 | −42.355 | 1.00 | 36.83 | | C |
| ATOM | 3749 | OH | TYR | 473 | 68.023 | 28.959 | −43.068 | 1.00 | 36.83 | | O |
| ATOM | 3750 | C | TYR | 473 | 64.699 | 30.480 | −38.037 | 1.00 | 36.83 | | C |
| ATOM | 3751 | O | TYR | 473 | 65.370 | 29.474 | −37.821 | 1.00 | 36.83 | | O |
| ATOM | 3752 | N | THR | 474 | 65.086 | 31.704 | −37.684 | 1.00 | 36.83 | | N |
| ATOM | 3753 | CA | THR | 474 | 66.358 | 31.942 | −37.009 | 1.00 | 36.83 | | O |
| ATOM | 3754 | CB | THR | 474 | 66.658 | 33.459 | −36.845 | 1.00 | 36.83 | | C |
| ATOM | 3755 | OG1 | THR | 474 | 66.640 | 34.103 | −38.120 | 1.00 | 36.83 | | O |
| ATOM | 3756 | CG2 | THR | 474 | 68.018 | 33.667 | −36.225 | 1.00 | 36.83 | | C |
| ATOM | 3757 | C | THR | 474 | 66.313 | 31.299 | −35.624 | 1.00 | 36.83 | | C |
| ATOM | 3758 | O | THR | 474 | 67.288 | 30.687 | −35.177 | 1.00 | 36.83 | | O |
| ATOM | 3759 | N | ASN | 475 | 65.168 | 31.434 | −34.960 | 1.00 | 36.83 | | N |
| ATOM | 3760 | CA | ASN | 475 | 64.995 | 30.873 | −33.632 | 1.00 | 36.83 | | C |
| ATOM | 3761 | CB | ASN | 475 | 63.694 | 31.389 | −33.001 | 1.00 | 36.83 | | C |
| ATOM | 3762 | CG | ASN | 475 | 63.833 | 32.792 | −32.453 | 1.00 | 36.83 | | C |
| ATOM | 3763 | OD1 | ASN | 475 | 64.089 | 32.972 | −31.277 | 1.00 | 36.83 | | O |
| ATOM | 3764 | ND2 | ASN | 475 | 63.683 | 33.789 | −33.312 | 1.00 | 36.83 | | N |
| ATOM | 3765 | C | ASN | 475 | 64.999 | 29.353 | −33.681 | 1.00 | 36.83 | | C |
| ATOM | 3766 | O | ASN | 475 | 65.402 | 28.709 | −32.720 | 1.00 | 36.83 | | O |
| ATOM | 3767 | N | GLU | 476 | 64.557 | 28.792 | −34.806 | 1.00 | 36.83 | | N |
| ATOM | 3768 | CA | GLU | 476 | 64.533 | 27.344 | −34.977 | 1.00 | 36.83 | | C |
| ATOM | 3769 | CB | GLU | 476 | 63.644 | 26.956 | −36.157 | 1.00 | 36.83 | | C |
| ATOM | 3770 | CG | GLU | 476 | 63.399 | 25.459 | −36.270 | 1.00 | 36.83 | | C |
| ATOM | 3771 | CD | GLU | 476 | 62.060 | 25.019 | −35.686 | 1.00 | 36.83 | | C |
| ATOM | 3772 | OE1 | GLU | 476 | 61.977 | 23.889 | −35.178 | 1.00 | 36.83 | | O |
| ATOM | 3773 | OE2 | GLU | 476 | 61.087 | 25.789 | −35.737 | 1.00 | 36.83 | | O |
| ATOM | 3774 | C | GLU | 476 | 65.969 | 26.825 | −35.210 | 1.00 | 36.83 | | C |
| ATOM | 3775 | O | GLU | 476 | 66.323 | 25.736 | −34.751 | 1.00 | 36.83 | | O |
| ATOM | 3776 | N | LYS | 477 | 66.789 | 27.600 | −35.919 | 1.00 | 36.83 | | N |
| ATOM | 3777 | CA | LYS | 477 | 68.167 | 27.184 | −36.151 | 1.00 | 36.83 | | C |
| ATOM | 3778 | CB | LYS | 477 | 68.816 | 28.009 | −37.256 | 1.00 | 36.83 | | C |
| ATOM | 3779 | CG | LYS | 477 | 68.184 | 27.756 | −38.606 | 1.00 | 36.83 | | C |
| ATOM | 3780 | CD | LYS | 477 | 69.132 | 28.016 | −39.761 | 1.00 | 36.83 | | C |
| ATOM | 3781 | CE | LYS | 477 | 70.227 | 26.963 | −39.850 | 1.00 | 36.83 | | C |
| ATOM | 3782 | NZ | LYS | 477 | 70.761 | 26.860 | −41.247 | 1.00 | 36.83 | | N |
| ATOM | 3783 | C | LYS | 477 | 68.991 | 27.264 | −34.861 | 1.00 | 36.83 | | C |
| ATOM | 3784 | O | LYS | 477 | 69.775 | 26.376 | −34.576 | 1.00 | 36.83 | | O |
| ATOM | 3785 | N | LEU | 478 | 68.787 | 28.315 | −34.073 | 1.00 | 36.83 | | N |
| ATOM | 3786 | CA | LEU | 478 | 69.497 | 28.451 | −32.813 | 1.00 | 36.83 | | C |
| ATOM | 3787 | CB | LEU | 478 | 69.146 | 29.784 | −32.159 | 1.00 | 36.83 | | C |
| ATOM | 3788 | CG | LEU | 478 | 69.755 | 30.124 | −30.793 | 1.00 | 36.83 | | C |
| ATOM | 3789 | CD1 | LEU | 478 | 71.224 | 29.782 | −30.745 | 1.00 | 36.83 | | C |
| ATOM | 3790 | CD2 | LEU | 478 | 69.539 | 31.596 | −30.525 | 1.00 | 36.83 | | C |
| ATOM | 3791 | C | LEU | 478 | 69.152 | 27.277 | −31.878 | 1.00 | 36.83 | | C |
| ATOM | 3792 | O | LEU | 478 | 70.034 | 26.723 | −31.208 | 1.00 | 36.83 | | O |
| ATOM | 3793 | N | GLN | 479 | 67.874 | 26.899 | −31.837 | 1.00 | 36.83 | | N |
| ATOM | 3794 | CA | GLN | 479 | 67.459 | 25.780 | −31.006 | 1.00 | 36.83 | | C |
| ATOM | 3795 | CB | GLN | 479 | 65.935 | 25.654 | −30.982 | 1.00 | 36.83 | | C |
| ATOM | 3796 | CG | GLN | 479 | 65.420 | 24.409 | −30.289 | 1.00 | 36.83 | | C |
| ATOM | 3797 | CD | GLN | 479 | 65.781 | 24.346 | −28.812 | 1.00 | 36.83 | | C |
| ATOM | 3798 | OE1 | GLN | 479 | 65.536 | 25.285 | −28.060 | 1.00 | 36.83 | | O |
| ATOM | 3799 | NE2 | GLN | 479 | 66.350 | 23.220 | −28.389 | 1.00 | 36.83 | | N |
| ATOM | 3800 | C | GLN | 479 | 68.077 | 24.474 | −31.509 | 1.00 | 36.83 | | C |
| ATOM | 3801 | O | GLN | 479 | 68.394 | 23.590 | −30.720 | 1.00 | 36.83 | | O |
| ATOM | 3802 | N | GLN | 480 | 68.237 | 24.337 | −32.818 | 1.00 | 36.83 | | N |
| ATOM | 3803 | CA | GLN | 480 | 68.847 | 23.128 | −33.354 | 1.00 | 36.83 | | C |
| ATOM | 3804 | CB | GLN | 480 | 68.702 | 23.064 | −34.866 | 1.00 | 36.83 | | C |
| ATOM | 3805 | CG | GLN | 480 | 69.062 | 21.708 | −35.458 | 1.00 | 36.83 | | C |
| ATOM | 3806 | CD | GLN | 480 | 68.157 | 20.594 | −34.957 | 1.00 | 36.83 | | C |
| ATOM | 3807 | OE1 | GLN | 480 | 67.863 | 19.650 | −35.682 | 1.00 | 36.83 | | O |
| ATOM | 3808 | NE2 | GLN | 480 | 67.724 | 20.691 | −33.719 | 1.00 | 36.83 | | N |
| ATOM | 3809 | C | GLN | 480 | 70.330 | 23.111 | −32.974 | 1.00 | 36.83 | | C |
| ATOM | 3810 | O | GLN | 480 | 70.897 | 22.061 | −32.696 | 1.00 | 36.83 | | O |
| ATOM | 3811 | N | PHE | 481 | 70.945 | 24.285 | −32.968 | 1.00 | 36.83 | | N |
| ATOM | 3812 | CA | PHE | 481 | 72.336 | 24.411 | −32.582 | 1.00 | 36.83 | | C |
| ATOM | 3813 | CB | PHE | 481 | 72.770 | 25.873 | −32.633 | 1.00 | 36.83 | | C |
| ATOM | 3814 | CG | PHE | 481 | 74.236 | 26.071 | −32.424 | 1.00 | 36.83 | | C |
| ATOM | 3815 | CD1 | PHE | 481 | 75.137 | 25.728 | −33.415 | 1.00 | 36.83 | | C |
| ATOM | 3816 | CD2 | PHE | 481 | 74.714 | 26.608 | −31.242 | 1.00 | 36.83 | | C |
| ATOM | 3817 | CE1 | PHE | 481 | 76.506 | 25.921 | −33.241 | 1.00 | 36.83 | | C |
| ATOM | 3818 | CE2 | PHE | 481 | 76.077 | 26.804 | −31.053 | 1.00 | 36.83 | | C |
| ATOM | 3819 | CZ | PHE | 481 | 76.977 | 26.459 | −32.062 | 1.00 | 36.83 | | C |
| ATOM | 3820 | C | PHE | 481 | 72.450 | 23.880 | −31.141 | 1.00 | 36.83 | | C |
| ATOM | 3821 | O | PHE | 481 | 73.349 | 23.108 | −30.829 | 1.00 | 36.83 | | O |
| ATOM | 3822 | N | PHE | 482 | 71.531 | 24.289 | −30.271 | 1.00 | 36.83 | | N |
| ATOM | 3823 | CA | PHE | 482 | 71.543 | 23.812 | −28.896 | 1.00 | 36.83 | | C |
| ATOM | 3824 | CB | PHE | 482 | 70.345 | 24.361 | −28.130 | 1.00 | 36.83 | | C |
| ATOM | 3825 | CG | PHE | 482 | 70.238 | 23.866 | −26.706 | 1.00 | 36.83 | | C |
| ATOM | 3826 | CD1 | PHE | 482 | 71.018 | 24.422 | −25.697 | 1.00 | 36.83 | | C |
| ATOM | 3827 | CD2 | PHE | 482 | 69.321 | 22.874 | −26.369 | 1.00 | 36.83 | | C |
| ATOM | 3828 | CE1 | PHE | 482 | 70.877 | 23.999 | −24.373 | 1.00 | 36.83 | | C |
| ATOM | 3829 | CE2 | PHE | 482 | 69.175 | 22.444 | −25.053 | 1.00 | 36.83 | | C |
| ATOM | 3830 | CZ | PHE | 482 | 69.949 | 23.004 | −24.053 | 1.00 | 36.83 | | C |
| ATOM | 3831 | C | PHE | 482 | 71.466 | 22.292 | −28.930 | 1.00 | 36.83 | | C |
| ATOM | 3832 | O | PHE | 482 | 72.282 | 21.605 | −28.304 | 1.00 | 36.83 | | O |
| ATOM | 3833 | N | ASN | 483 | 70.483 | 21.771 | −29.665 | 1.00 | 36.83 | | N |
| ATOM | 3834 | CA | ASN | 483 | 70.299 | 20.327 | −29.782 | 1.00 | 36.83 | | C |
| ATOM | 3835 | CB | ASN | 483 | 69.176 | 20.000 | −30.776 | 1.00 | 36.83 | | C |
| ATOM | 3836 | CG | ASN | 483 | 67.807 | 20.552 | −30.342 | 1.00 | 36.83 | | C |
| ATOM | 3837 | OD1 | ASN | 483 | 67.502 | 20.625 | −29.158 | 1.00 | 36.83 | | O |
| ATOM | 3838 | ND2 | ASN | 483 | 66.980 | 20.921 | −31.312 | 1.00 | 36.83 | | N |
| ATOM | 3839 | C | ASN | 483 | 71.591 | 19.631 | −30.234 | 1.00 | 36.83 | | C |
| ATOM | 3840 | O | ASN | 483 | 71.953 | 18.566 | −29.736 | 1.00 | 36.83 | | O |
| ATOM | 3841 | N | HIS | 484 | 72.278 | 20.248 | −31.180 | 1.00 | 36.83 | | N |
| ATOM | 3842 | CA | HIS | 484 | 73.507 | 19.693 | −31.725 | 1.00 | 36.83 | | C |
| ATOM | 3843 | CB | HIS | 484 | 73.992 | 20.591 | −32.870 | 1.00 | 36.83 | | C |
| ATOM | 3844 | CG | HIS | 484 | 74.996 | 19.944 | −33.771 | 1.00 | 36.83 | | C |
| ATOM | 3845 | CD2 | HIS | 484 | 76.175 | 20.395 | −34.262 | 1.00 | 36.83 | | C |
| ATOM | 3846 | ND1 | HIS | 484 | 74.808 | 18.692 | −34.316 | 1.00 | 36.83 | | N |
| ATOM | 3847 | CE1 | HIS | 484 | 75.824 | 18.399 | −35.106 | 1.00 | 36.83 | | C |
| ATOM | 3848 | NE2 | HIS | 484 | 76.667 | 19.417 | −35.091 | 1.00 | 36.83 | | N |
| ATOM | 3849 | C | HIS | 484 | 74.606 | 19.529 | −30.658 | 1.00 | 36.83 | | C |
| ATOM | 3850 | O | HIS | 484 | 75.104 | 18.417 | −30.436 | 1.00 | 36.83 | | O |
| ATOM | 3851 | N | HIS | 485 | 74.960 | 20.627 | −29.997 | 1.00 | 36.83 | | N |
| ATOM | 3852 | CA | HIS | 485 | 75.995 | 20.617 | −28.968 | 1.00 | 36.83 | | C |
| ATOM | 3853 | CB | HIS | 485 | 76.474 | 22.046 | −28.718 | 1.00 | 36.83 | | C |
| ATOM | 3854 | CG | HIS | 485 | 77.201 | 22.642 | −29.883 | 1.00 | 36.83 | | C |
| ATOM | 3855 | CD2 | HIS | 485 | 76.748 | 23.340 | −30.956 | 1.00 | 36.83 | | C |
| ATOM | 3856 | ND1 | HIS | 485 | 78.561 | 22.498 | −30.068 | 1.00 | 36.83 | | N |
| ATOM | 3857 | CE1 | HIS | 485 | 78.914 | 23.081 | −31.200 | 1.00 | 36.83 | | C |
| ATOM | 3858 | NE2 | HIS | 485 | 77.834 | 23.598 | −31.761 | 1.00 | 36.83 | | N |
| ATOM | 3859 | C | HIS | 485 | 75.660 | 19.942 | −27.632 | 1.00 | 36.83 | | C |
| ATOM | 3860 | O | HIS | 485 | 76.574 | 19.624 | −26.872 | 1.00 | 36.83 | | O |
| ATOM | 3861 | N | MET | 486 | 74.380 | 19.708 | −27.342 | 1.00 | 36.83 | | N |
| ATOM | 3862 | CA | MET | 486 | 73.992 | 19.066 | −26.083 | 1.00 | 36.83 | | C |
| ATOM | 3863 | CB | MET | 486 | 72.686 | 19.657 | −25.556 | 1.00 | 36.83 | | C |
| ATOM | 3864 | CG | MET | 486 | 72.835 | 21.029 | −24.953 | 1.00 | 36.83 | | C |
| ATOM | 3865 | SD | MET | 486 | 73.916 | 20.969 | −23.538 | 1.00 | 36.83 | | S |
| ATOM | 3866 | CE | MET | 486 | 72.835 | 20.223 | −22.333 | 1.00 | 36.83 | | C |
| ATOM | 3867 | C | MET | 486 | 73.803 | 17.567 | −26.226 | 1.00 | 36.83 | | C |
| ATOM | 3868 | O | MET | 486 | 74.160 | 16.784 | −25.340 | 1.00 | 36.83 | | O |
| ATOM | 3869 | N | PHE | 487 | 73.231 | 17.174 | −27.351 | 1.00 | 36.83 | | N |
| ATOM | 3870 | CA | PHE | 487 | 72.975 | 15.776 | −27.597 | 1.00 | 36.83 | | C |
| ATOM | 3871 | CB | PHE | 487 | 71.491 | 15.593 | −27.920 | 1.00 | 36.83 | | C |
| ATOM | 3872 | CG | PHE | 487 | 70.590 | 16.420 | −27.042 | 1.00 | 36.83 | | C |
| ATOM | 3873 | CD1 | PHE | 487 | 70.633 | 16.280 | −25.652 | 1.00 | 36.83 | | C |
| ATOM | 3874 | CD2 | PHE | 487 | 69.760 | 17.389 | −27.591 | 1.00 | 36.83 | | C |
| ATOM | 3875 | CE1 | PHE | 487 | 69.867 | 17.104 | −24.814 | 1.00 | 36.83 | | C |
| ATOM | 3876 | CE2 | PHE | 487 | 68.983 | 18.225 | −26.763 | 1.00 | 36.83 | | C |
| ATOM | 3877 | CZ | PHE | 487 | 69.042 | 18.081 | −25.369 | 1.00 | 36.83 | | C |
| ATOM | 3878 | C | PHE | 487 | 73.861 | 15.261 | −28.710 | 1.00 | 36.83 | | C |
| ATOM | 3879 | O | PHE | 487 | 74.886 | 14.653 | −28.440 | 1.00 | 36.83 | | O |
| ATOM | 3880 | N | LYS | 488 | 73.494 | 15.531 | −29.952 | 1.00 | 36.83 | | N |
| ATOM | 3881 | CA | LYS | 488 | 74.260 | 15.062 | −31.103 | 1.00 | 36.83 | | C |
| ATOM | 3882 | CB | LYS | 488 | 73.976 | 15.959 | −32.316 | 1.00 | 36.83 | | C |
| ATOM | 3883 | CG | LYS | 488 | 74.406 | 15.372 | −33.663 | 1.00 | 36.83 | | C |
| ATOM | 3884 | CD | LYS | 488 | 73.762 | 14.011 | −33.897 | 1.00 | 36.83 | | C |
| ATOM | 3885 | CE | LYS | 488 | 73.604 | 13.703 | −35.391 | 1.00 | 36.83 | | C |
| ATOM | 3886 | NZ | LYS | 488 | 74.876 | 13.794 | −36.139 | 1.00 | 36.83 | | N |
| ATOM | 3887 | C | LYS | 488 | 75.775 | 14.978 | −30.846 | 1.00 | 36.83 | | C |
| ATOM | 3888 | O | LYS | 488 | 76.285 | 13.926 | −30.462 | 1.00 | 36.83 | | O |
| ATOM | 3889 | N | LEU | 489 | 76.496 | 16.077 | −31.048 | 1.00 | 36.83 | | N |
| ATOM | 3890 | CA | LEU | 489 | 77.947 | 16.061 | −30.839 | 1.00 | 36.83 | | C |
| ATOM | 3891 | CB | LEU | 489 | 78.507 | 17.492 | −30.755 | 1.00 | 36.83 | | C |
| ATOM | 3892 | CG | LEU | 489 | 78.385 | 18.329 | −32.023 | 1.00 | 36.83 | | C |
| ATOM | 3893 | CD1 | LEU | 489 | 79.219 | 19.586 | −31.892 | 1.00 | 36.83 | | C |
| ATOM | 3894 | CD2 | LEU | 489 | 78.863 | 17.512 | −33.206 | 1.00 | 36.83 | | C |
| ATOM | 3895 | C | LEU | 489 | 78.362 | 15.282 | −29.589 | 1.00 | 36.83 | | C |
| ATOM | 3896 | O | LEU | 489 | 79.264 | 14.453 | −29.639 | 1.00 | 36.83 | | O |
| ATOM | 3897 | N | GLU | 490 | 77.699 | 15.549 | −28.475 | 1.00 | 36.83 | | N |
| ATOM | 3898 | CA | GLU | 490 | 78.021 | 14.885 | −27.219 | 1.00 | 36.83 | | C |
| ATOM | 3899 | CB | GLU | 490 | 76.988 | 15.259 | −26.160 | 1.00 | 36.83 | | C |
| ATOM | 3900 | CG | GLU | 490 | 77.251 | 14.680 | −24.792 | 1.00 | 36.83 | | C |
| ATOM | 3901 | CD | GLU | 490 | 78.647 | 14.990 | −24.294 | 1.00 | 36.83 | | C |
| ATOM | 3902 | OE1 | GLU | 490 | 79.285 | 15.930 | −24.826 | 1.00 | 36.83 | | O |
| ATOM | 3903 | OE2 | GLU | 490 | 79.097 | 14.298 | −23.355 | 1.00 | 36.83 | | O |
| ATOM | 3904 | C | GLU | 490 | 78.079 | 13.369 | −27.357 | 1.00 | 36.83 | | C |
| ATOM | 3905 | O | GLU | 490 | 79.084 | 12.736 | −27.027 | 1.00 | 36.83 | | O |
| ATOM | 3906 | N | GLN | 491 | 76.996 | 12.790 | −27.854 | 1.00 | 36.83 | | N |
| ATOM | 3907 | CA | GLN | 491 | 76.914 | 11.351 | −28.007 | 1.00 | 36.83 | | C |
| ATOM | 3908 | CB | GLN | 491 | 75.485 | 10.935 | −28.334 | 1.00 | 36.83 | | C |
| ATOM | 3909 | CG | GLN | 491 | 74.464 | 11.240 | −27.260 | 1.00 | 36.83 | | C |
| ATOM | 3910 | CD | GLN | 491 | 73.212 | 10.388 | −27.418 | 1.00 | 36.83 | | C |
| ATOM | 3911 | OE1 | GLN | 491 | 73.106 | 9.316 | −26.834 | 1.00 | 36.83 | | O |
| ATOM | 3912 | NE2 | GLN | 491 | 72.272 | 10.853 | −28.232 | 1.00 | 36.83 | | N |
| ATOM | 3913 | C | GLN | 491 | 77.847 | 10.799 | −29.064 | 1.00 | 36.83 | | C |
| ATOM | 3914 | O | GLN | 491 | 78.481 | 9.767 | −28.854 | 1.00 | 36.83 | | O |
| ATOM | 3915 | N | GLU | 492 | 77.936 | 11.474 | −30.205 | 1.00 | 36.83 | | N |
| ATOM | 3916 | CA | GLU | 492 | 78.800 | 10.995 | −31.271 | 1.00 | 36.83 | | C |
| ATOM | 3917 | CB | GLU | 492 | 78.772 | 11.935 | −32.452 | 1.00 | 36.83 | | C |
| ATOM | 3918 | CG | GLU | 492 | 77.470 | 11.981 | −33.184 | 1.00 | 36.83 | | C |
| ATOM | 3919 | CD | GLU | 492 | 77.510 | 13.079 | −34.218 | 1.00 | 36.83 | | C |
| ATOM | 3920 | OE1 | GLU | 492 | 78.074 | 14.146 | −33.871 | 1.00 | 36.83 | | O |
| ATOM | 3921 | OE2 | GLU | 492 | 77.000 | 12.877 | −35.352 | 1.00 | 36.83 | | O |
| ATOM | 3922 | C | GLU | 492 | 80.236 | 10.823 | −30.827 | 1.00 | 36.83 | | C |
| ATOM | 3923 | O | GLU | 492 | 80.995 | 10.083 | −31.454 | 1.00 | 36.83 | | O |
| ATOM | 3924 | N | GLU | 493 | 80.603 | 11.524 | −29.761 | 1.00 | 36.83 | | N |
| ATOM | 3925 | CA | GLU | 493 | 81.942 | 11.464 | −29.201 | 1.00 | 36.83 | | C |
| ATOM | 3926 | CB | GLU | 493 | 82.180 | 12.715 | −28.346 | 1.00 | 36.83 | | C |
| ATOM | 3927 | CG | GLU | 493 | 83.554 | 12.830 | −27.676 | 1.00 | 36.83 | | C |
| ATOM | 3928 | CD | GLU | 493 | 84.710 | 12.898 | −28.672 | 1.00 | 36.83 | | C |
| ATOM | 3929 | OE1 | GLU | 493 | 84.735 | 13.817 | −29.522 | 1.00 | 36.83 | | O |
| ATOM | 3930 | OE2 | GLU | 493 | 85.603 | 12.032 | −28.600 | 1.00 | 36.83 | | O |
| ATOM | 3931 | C | GLU | 493 | 81.995 | 10.197 | −28.334 | 1.00 | 36.83 | | C |
| ATOM | 3932 | O | GLU | 493 | 83.046 | 9.551 | −28.198 | 1.00 | 36.83 | | O |
| ATOM | 3933 | N | TYR | 494 | 80.844 | 9.842 | −27.765 | 1.00 | 36.83 | | N |
| ATOM | 3934 | CA | TYR | 494 | 80.746 | 8.675 | −26.917 | 1.00 | 36.83 | | C |
| ATOM | 3935 | CB | TYR | 494 | 79.374 | 8.577 | −26.269 | 1.00 | 36.83 | | C |
| ATOM | 3936 | CG | TYR | 494 | 79.125 | 9.525 | −25.131 | 1.00 | 36.83 | | C |
| ATOM | 3937 | CD1 | TYR | 494 | 80.164 | 9.962 | −24.312 | 1.00 | 36.83 | | C |
| ATOM | 3938 | CE1 | TYR | 494 | 79.914 | 10.822 | −23.246 | 1.00 | 36.83 | | C |
| ATOM | 3939 | CD2 | TYR | 494 | 77.835 | 9.964 | −24.857 | 1.00 | 36.83 | | C |
| ATOM | 3940 | CE2 | TYR | 494 | 77.580 | 10.814 | −23.807 | 1.00 | 36.83 | | C |
| ATOM | 3941 | CZ | TYR | 494 | 78.614 | 11.245 | −23.008 | 1.00 | 36.83 | | C |
| ATOM | 3942 | OH | TYR | 494 | 78.333 | 12.138 | −22.003 | 1.00 | 36.83 | | O |
| ATOM | 3943 | C | TYR | 494 | 80.978 | 7.387 | −27.669 | 1.00 | 36.83 | | C |
| ATOM | 3944 | O | TYR | 494 | 81.842 | 6.588 | −27.288 | 1.00 | 36.83 | | O |
| ATOM | 3945 | N | LEU | 495 | 80.184 | 7.181 | −28.715 | 1.00 | 36.83 | | N |
| ATOM | 3946 | CA | LEU | 495 | 80.250 | 5.963 | −29.515 | 1.00 | 36.83 | | C |
| ATOM | 3947 | CB | LEU | 495 | 78.876 | 5.656 | −30.115 | 1.00 | 36.83 | | C |
| ATOM | 3948 | CG | LEU | 495 | 77.724 | 5.388 | −29.137 | 1.00 | 36.83 | | C |
| ATOM | 3949 | CD1 | LEU | 495 | 76.455 | 5.236 | −29.945 | 1.00 | 36.83 | | C |
| ATOM | 3950 | CD2 | LEU | 495 | 77.987 | 4.150 | −28.286 | 1.00 | 36.83 | | C |
| ATOM | 3951 | C | LEU | 495 | 81.285 | 6.024 | −30.624 | 1.00 | 36.83 | | C |
| ATOM | 3952 | O | LEU | 495 | 81.126 | 5.406 | −31.687 | 1.00 | 36.83 | | O |
| ATOM | 3953 | N | LYS | 496 | 82.332 | 6.799 | −30.371 | 1.00 | 36.83 | | N |
| ATOM | 3954 | CA | LYS | 496 | 83.440 | 6.971 | −31.306 | 1.00 | 36.83 | | C |
| ATOM | 3955 | CB | LYS | 496 | 83.528 | 8.432 | −31.754 | 1.00 | 36.83 | | C |
| ATOM | 3956 | CG | LYS | 496 | 84.892 | 8.860 | −32.313 | 1.00 | 36.83 | | C |
| ATOM | 3957 | CD | LYS | 496 | 84.955 | 8.767 | −33.836 | 1.00 | 36.83 | | C |
| ATOM | 3958 | CE | LYS | 496 | 86.317 | 9.218 | −34.333 | 1.00 | 36.83 | | C |
| ATOM | 3959 | NZ | LYS | 496 | 87.388 | 8.302 | −33.805 | 1.00 | 36.83 | | N |
| ATOM | 3960 | C | LYS | 496 | 84.640 | 6.610 | −30.457 | 1.00 | 36.83 | | C |
| ATOM | 3961 | O | LYS | 496 | 85.748 | 6.372 | −30.960 | 1.00 | 36.83 | | O |
| ATOM | 3962 | N | GLU | 497 | 84.388 | 6.564 | −29.153 | 1.00 | 36.83 | | N |
| ATOM | 3963 | CA | GLU | 497 | 85.403 | 6.240 | −28.173 | 1.00 | 36.83 | | C |
| ATOM | 3964 | CB | GLU | 497 | 85.598 | 7.431 | −27.255 | 1.00 | 36.83 | | C |
| ATOM | 3965 | CG | GLU | 497 | 86.224 | 8.580 | −28.024 | 1.00 | 36.83 | | C |
| ATOM | 3966 | CD | GLU | 497 | 87.479 | 8.121 | −28.740 | 1.00 | 36.83 | | C |
| ATOM | 3967 | OE1 | GLU | 497 | 88.373 | 7.610 | −28.029 | 1.00 | 36.83 | | O |
| ATOM | 3968 | OE2 | GLU | 497 | 87.574 | 8.259 | −29.994 | 1.00 | 36.83 | | O |
| ATOM | 3969 | C | GLU | 497 | 85.123 | 4.974 | −27.376 | 1.00 | 36.83 | | C |
| ATOM | 3970 | O | GLU | 497 | 85.680 | 4.784 | −26.285 | 1.00 | 36.83 | | O |
| ATOM | 3971 | N | LYS | 498 | 84.261 | 4.116 | −27.929 | 1.00 | 36.83 | | N |
| ATOM | 3972 | CA | LYS | 498 | 83.928 | 2.823 | −27.318 | 1.00 | 36.83 | | C |
| ATOM | 3973 | CB | LYS | 498 | 84.963 | 1.771 | −27.748 | 1.00 | 36.83 | | C |
| ATOM | 3974 | CG | LYS | 498 | 85.111 | 1.615 | −29.258 | 1.00 | 36.83 | | C |
| ATOM | 3975 | CD | LYS | 498 | 83.811 | 1.176 | −29.906 | 1.00 | 36.83 | | C |
| ATOM | 3976 | CE | LYS | 498 | 83.845 | 1.433 | −31.404 | 1.00 | 36.83 | | C |
| ATOM | 3977 | NZ | LYS | 498 | 83.993 | 2.894 | −31.737 | 1.00 | 36.83 | | N |
| ATOM | 3978 | C | LYS | 498 | 83.877 | 2.899 | −25.796 | 1.00 | 36.83 | | C |
| ATOM | 3979 | O | LYS | 498 | 84.726 | 2.337 | −25.083 | 1.00 | 36.83 | | O |
| ATOM | 3980 | N | ILE | 499 | 82.857 | 3.589 | −25.318 | 1.00 | 36.83 | | N |
| ATOM | 3981 | CA | ILE | 499 | 82.619 | 3.815 | −23.905 | 1.00 | 36.83 | | C |
| ATOM | 3982 | CB | ILE | 499 | 82.393 | 5.358 | −23.701 | 1.00 | 36.83 | | C |
| ATOM | 3983 | CG2 | ILE | 499 | 81.492 | 5.661 | −22.523 | 1.00 | 36.83 | | C |
| ATOM | 3984 | CG1 | ILE | 499 | 83.753 | 6.044 | −23.526 | 1.00 | 36.83 | | C |
| ATOM | 3985 | CD1 | ILE | 499 | 84.458 | 5.706 | −22.202 | 1.00 | 36.83 | | C |
| ATOM | 3986 | C | ILE | 499 | 81.396 | 2.974 | −23.533 | 1.00 | 36.83 | | C |
| ATOM | 3987 | O | ILE | 499 | 80.778 | 3.156 | −22.478 | 1.00 | 36.83 | | O |
| ATOM | 3988 | N | ASN | 500 | 81.076 | 2.018 | −24.401 | 1.00 | 36.83 | | N |
| ATOM | 3989 | CA | ASN | 500 | 79.904 | 1.185 | −24.188 | 1.00 | 36.83 | | C |
| ATOM | 3990 | CB | ASN | 500 | 80.205 | 0.034 | −23.222 | 1.00 | 36.83 | | C |
| ATOM | 3991 | CG | ASN | 500 | 81.081 | −1.037 | −23.857 | 1.00 | 36.83 | | C |
| ATOM | 3992 | OD1 | ASN | 500 | 80.706 | −1.643 | −24.875 | 1.00 | 36.83 | | O |
| ATOM | 3993 | ND2 | ASN | 500 | 82.257 | −1.274 | −23.265 | 1.00 | 36.83 | | N |
| ATOM | 3994 | C | ASN | 500 | 78.777 | 2.043 | −23.632 | 1.00 | 36.83 | | C |
| ATOM | 3995 | O | ASN | 500 | 78.396 | 1.913 | −22.472 | 1.00 | 36.83 | | O |
| ATOM | 3996 | N | TRP | 501 | 78.258 | 2.929 | −24.475 | 1.00 | 36.83 | | N |
| ATOM | 3997 | CA | TRP | 501 | 77.164 | 3.820 | −24.101 | 1.00 | 36.83 | | C |
| ATOM | 3998 | CB | TRP | 501 | 77.592 | 5.275 | −24.313 | 1.00 | 36.83 | | C |
| ATOM | 3999 | CG | TRP | 501 | 76.474 | 6.271 | −24.532 | 1.00 | 36.83 | | C |
| ATOM | 4000 | CD2 | TRP | 501 | 75.897 | 7.152 | −23.550 | 1.00 | 36.83 | | C |
| ATOM | 4001 | CE2 | TRP | 501 | 74.928 | 7.940 | −24.213 | 1.00 | 36.83 | | C |
| ATOM | 4002 | CE3 | TRP | 501 | 76.110 | 7.354 | −22.179 | 1.00 | 36.83 | | C |
| ATOM | 4003 | CD1 | TRP | 501 | 75.841 | 6.551 | −25.715 | 1.00 | 36.83 | | C |
| ATOM | 4004 | NE1 | TRP | 501 | 74.913 | 7.555 | −25.530 | 1.00 | 36.83 | | N |
| ATOM | 4005 | CZ2 | TRP | 501 | 74.175 | 8.913 | −23.550 | 1.00 | 36.83 | | C |
| ATOM | 4006 | CZ3 | TRP | 501 | 75.357 | 8.327 | −21.519 | 1.00 | 36.83 | | C |
| ATOM | 4007 | CH2 | TRP | 501 | 74.403 | 9.092 | −22.209 | 1.00 | 36.83 | | C |
| ATOM | 4008 | C | TRP | 501 | 75.985 | 3.484 | −24.981 | 1.00 | 36.83 | | C |
| ATOM | 4009 | O | TRP | 501 | 76.151 | 3.337 | −26.186 | 1.00 | 36.83 | | O |
| ATOM | 4010 | N | THR | 502 | 74.800 | 3.338 | −24.385 | 1.00 | 36.83 | | N |
| ATOM | 4011 | CA | THR | 502 | 73.616 | 3.022 | −25.171 | 1.00 | 36.83 | | C |
| ATOM | 4012 | CB | THR | 502 | 72.575 | 2.209 | −24.355 | 1.00 | 36.83 | | C |
| ATOM | 4013 | OG1 | THR | 502 | 71.756 | 3.090 | −23.565 | 1.00 | 36.83 | | O |
| ATOM | 4014 | CG2 | THR | 502 | 73.298 | 1.223 | −23.431 | 1.00 | 36.83 | | C |
| ATOM | 4015 | C | THR | 502 | 72.996 | 4.330 | −25.646 | 1.00 | 36.83 | | C |
| ATOM | 4016 | O | THR | 502 | 72.483 | 5.119 | −24.843 | 1.00 | 36.83 | | O |
| ATOM | 4017 | N | PHE | 503 | 73.082 | 4.562 | −26.952 | 1.00 | 36.83 | | N |
| ATOM | 4018 | CA | PHE | 503 | 72.534 | 5.768 | −27.559 | 1.00 | 36.83 | | C |
| ATOM | 4019 | CB | PHE | 503 | 72.490 | 5.598 | −29.082 | 1.00 | 36.83 | | C |
| ATOM | 4020 | CG | PHE | 503 | 71.674 | 6.645 | −29.793 | 1.00 | 36.83 | | C |
| ATOM | 4021 | CD1 | PHE | 503 | 72.244 | 7.857 | −30.164 | 1.00 | 36.83 | | C |
| ATOM | 4022 | CD2 | PHE | 503 | 70.338 | 6.417 | −30.083 | 1.00 | 36.83 | | C |
| ATOM | 4023 | CE1 | PHE | 503 | 71.493 | 8.825 | −30.812 | 1.00 | 36.83 | | C |
| ATOM | 4024 | CE2 | PHE | 503 | 69.567 | 7.383 | −30.734 | 1.00 | 36.83 | | C |
| ATOM | 4025 | CZ | PHE | 503 | 70.148 | 8.588 | −31.098 | 1.00 | 36.83 | | C |
| ATOM | 4026 | C | PHE | 503 | 71.126 | 6.059 | −27.018 | 1.00 | 36.83 | | C |
| ATOM | 4027 | O | PHE | 503 | 70.350 | 5.141 | −26.705 | 1.00 | 36.83 | | O |
| ATOM | 4028 | N | ILE | 504 | 70.799 | 7.338 | −26.895 | 1.00 | 36.83 | | N |
| ATOM | 4029 | CA | ILE | 504 | 69.484 | 7.718 | −26.401 | 1.00 | 36.83 | | C |
| ATOM | 4030 | CB | ILE | 504 | 69.572 | 8.327 | −24.978 | 1.00 | 36.83 | | C |
| ATOM | 4031 | CG2 | ILE | 504 | 68.179 | 8.743 | −24.487 | 1.00 | 36.83 | | C |
| ATOM | 4032 | CG1 | ILE | 504 | 70.202 | 7.321 | −24.014 | 1.00 | 36.83 | | C |
| ATOM | 4033 | CD1 | ILE | 504 | 69.589 | 5.933 | −24.071 | 1.00 | 36.83 | | C |
| ATOM | 4034 | C | ILE | 504 | 68.877 | 8.754 | −27.338 | 1.00 | 36.83 | | C |
| ATOM | 4035 | O | ILE | 504 | 69.540 | 9.728 | −27.692 | 1.00 | 36.83 | | O |
| ATOM | 4036 | N | ASP | 505 | 67.630 | 8.530 | −27.748 | 1.00 | 36.83 | | N |
| ATOM | 4037 | CA | ASP | 505 | 66.917 | 9.465 | −28.612 | 1.00 | 36.83 | | C |
| ATOM | 4038 | CB | ASP | 505 | 65.892 | 8.726 | −29.476 | 1.00 | 36.83 | | C |
| ATOM | 4039 | CG | ASP | 505 | 65.456 | 9.532 | −30.684 | 1.00 | 36.83 | | C |
| ATOM | 4040 | OD1 | ASP | 505 | 65.283 | 10.770 | −30.533 | 1.00 | 36.83 | | O |
| ATOM | 4041 | OD2 | ASP | 505 | 65.278 | 8.928 | −31.779 | 1.00 | 36.83 | | O |
| ATOM | 4042 | C | ASP | 505 | 66.180 | 10.430 | −27.680 | 1.00 | 36.83 | | C |
| ATOM | 4043 | O | ASP | 505 | 65.117 | 10.107 | −27.148 | 1.00 | 36.83 | | O |
| ATOM | 4044 | N | PHE | 506 | 66.759 | 11.605 | −27.461 | 1.00 | 36.83 | | N |
| ATOM | 4045 | CA | PHE | 506 | 66.144 | 12.602 | −26.591 | 1.00 | 36.83 | | C |
| ATOM | 4046 | CB | PHE | 506 | 67.188 | 13.658 | −26.197 | 1.00 | 36.83 | | C |
| ATOM | 4047 | CG | PHE | 506 | 68.200 | 13.165 | −25.194 | 1.00 | 36.83 | | C |
| ATOM | 4048 | CD1 | PHE | 506 | 67.875 | 13.080 | −23.839 | 1.00 | 36.83 | | C |
| ATOM | 4049 | CD2 | PHE | 506 | 69.475 | 12.772 | −25.599 | 1.00 | 36.83 | | C |
| ATOM | 4050 | CE1 | PHE | 506 | 68.806 | 12.612 | −22.902 | 1.00 | 36.83 | | C |
| ATOM | 4051 | CE2 | PHE | 506 | 70.414 | 12.302 | −24.669 | 1.00 | 36.83 | | C |
| ATOM | 4052 | CZ | PHE | 506 | 70.079 | 12.223 | −23.324 | 1.00 | 36.83 | | C |
| ATOM | 4053 | C | PHE | 506 | 64.928 | 13.256 | −27.268 | 1.00 | 36.83 | | C |
| ATOM | 4054 | O | PHE | 506 | 64.223 | 14.065 | −26.657 | 1.00 | 36.83 | | O |
| ATOM | 4055 | N | GLY | 507 | 64.700 | 12.904 | −28.533 | 1.00 | 36.83 | | N |
| ATOM | 4056 | CA | GLY | 507 | 63.562 | 13.428 | −29.279 | 1.00 | 36.83 | | C |
| ATOM | 4057 | C | GLY | 507 | 63.471 | 14.915 | −29.627 | 1.00 | 36.83 | | C |
| ATOM | 4058 | O | GLY | 507 | 62.368 | 15.422 | −29.849 | 1.00 | 36.83 | | O |
| ATOM | 4059 | N | LEU | 508 | 64.599 | 15.621 | −29.666 | 1.00 | 36.83 | | N |
| ATOM | 4060 | CA | LEU | 508 | 64.592 | 17.051 | −30.026 | 1.00 | 36.83 | | C |
| ATOM | 4061 | CB | LEU | 508 | 65.377 | 17.902 | −29.021 | 1.00 | 36.83 | | C |
| ATOM | 4062 | CG | LEU | 508 | 65.006 | 17.928 | −27.534 | 1.00 | 36.83 | | C |
| ATOM | 4063 | CD1 | LEU | 508 | 63.538 | 18.293 | −27.343 | 1.00 | 36.83 | | C |
| ATOM | 4064 | CD2 | LEU | 508 | 65.308 | 16.583 | −26.934 | 1.00 | 36.83 | | C |
| ATOM | 4065 | C | LEU | 508 | 65.298 | 17.089 | −31.364 | 1.00 | 36.83 | | C |
| ATOM | 4066 | O | LEU | 508 | 66.484 | 16.746 | −31.455 | 1.00 | 36.83 | | O |
| ATOM | 4067 | N | ASP | 509 | 64.584 | 17.492 | −32.408 | 1.00 | 36.83 | | N |
| ATOM | 4068 | CA | ASP | 509 | 65.191 | 17.503 | −33.731 | 1.00 | 36.83 | | C |
| ATOM | 4069 | CB | ASP | 509 | 65.372 | 16.054 | −34.209 | 1.00 | 36.83 | | C |
| ATOM | 4070 | CG | ASP | 509 | 66.332 | 15.923 | −35.381 | 1.00 | 36.83 | | C |
| ATOM | 4071 | OD1 | ASP | 509 | 66.527 | 14.770 | −35.831 | 1.00 | 36.83 | | O |
| ATOM | 4072 | OD2 | ASP | 509 | 66.891 | 16.943 | −35.855 | 1.00 | 36.83 | | O |
| ATOM | 4073 | C | ASP | 509 | 64.287 | 18.268 | −34.676 | 1.00 | 36.83 | | C |
| ATOM | 4074 | O | ASP | 509 | 63.345 | 17.704 | −35.252 | 1.00 | 36.83 | | O |
| ATOM | 4075 | N | SER | 510 | 64.595 | 19.552 | −34.843 | 1.00 | 36.83 | | N |
| ATOM | 4076 | CA | SER | 510 | 63.815 | 20.427 | −35.698 | 1.00 | 36.83 | | C |
| ATOM | 4077 | CB | SER | 510 | 63.711 | 21.800 | −35.048 | 1.00 | 36.83 | | C |
| ATOM | 4078 | OG | SER | 510 | 64.981 | 22.398 | −34.993 | 1.00 | 36.83 | | O |
| ATOM | 4079 | C | SER | 510 | 64.402 | 20.569 | −37.098 | 1.00 | 36.83 | | C |
| ATOM | 4080 | O | SER | 510 | 64.240 | 21.613 | −37.741 | 1.00 | 36.83 | | O |
| ATOM | 4081 | N | GLN | 511 | 65.074 | 19.519 | −37.570 | 1.00 | 36.83 | | N |
| ATOM | 4082 | CA | GLN | 511 | 65.677 | 19.555 | −38.899 | 1.00 | 36.83 | | C |
| ATOM | 4083 | CB | GLN | 511 | 66.598 | 18.343 | −39.111 | 1.00 | 36.83 | | C |
| ATOM | 4084 | CG | GLN | 511 | 67.428 | 18.403 | −40.402 | 1.00 | 36.83 | | C |
| ATOM | 4085 | CD | GLN | 511 | 68.285 | 19.680 | −40.531 | 1.00 | 36.83 | | C |
| ATOM | 4086 | OE1 | GLN | 511 | 68.338 | 20.298 | −41.601 | 1.00 | 36.83 | | O |
| ATOM | 4087 | NE2 | GLN | 511 | 68.957 | 20.067 | −39.451 | 1.00 | 36.83 | | N |
| ATOM | 4088 | C | GLN | 511 | 64.595 | 19.594 | −39.984 | 1.00 | 36.83 | | C |
| ATOM | 4089 | O | GLN | 511 | 64.705 | 20.344 | −40.954 | 1.00 | 36.83 | | O |
| ATOM | 4090 | N | ALA | 512 | 63.547 | 18.798 | −39.808 | 1.00 | 36.83 | | N |
| ATOM | 4091 | CA | ALA | 512 | 62.467 | 18.759 | −40.780 | 1.00 | 36.83 | | C |
| ATOM | 4092 | CB | ALA | 512 | 61.413 | 17.761 | −40.350 | 1.00 | 36.83 | | C |
| ATOM | 4093 | C | ALA | 512 | 61.845 | 20.139 | −40.959 | 1.00 | 36.83 | | C |
| ATOM | 4094 | O | ALA | 512 | 61.524 | 20.534 | −42.076 | 1.00 | 36.83 | | O |
| ATOM | 4095 | N | THR | 513 | 61.676 | 20.878 | −39.871 | 1.00 | 36.83 | | N |
| ATOM | 4096 | CA | THR | 513 | 61.091 | 22.207 | −39.979 | 1.00 | 36.83 | | C |
| ATOM | 4097 | CB | THR | 513 | 60.756 | 22.796 | −38.595 | 1.00 | 36.83 | | C |
| ATOM | 4098 | OG1 | THR | 513 | 59.729 | 22.005 | −37.990 | 1.00 | 36.83 | | O |
| ATOM | 4099 | CG2 | THR | 513 | 60.284 | 24.252 | −38.721 | 1.00 | 36.83 | | C |
| ATOM | 4100 | C | THR | 513 | 62.062 | 23.119 | −40.697 | 1.00 | 36.83 | | C |
| ATOM | 4101 | O | THR | 513 | 61.669 | 23.908 | −41.544 | 1.00 | 36.83 | | O |
| ATOM | 4102 | N | ILE | 514 | 63.338 | 22.994 | −40.358 | 1.00 | 36.83 | | N |
| ATOM | 4103 | CA | ILE | 514 | 64.380 | 23.796 | −40.983 | 1.00 | 36.83 | | C |
| ATOM | 4104 | CB | ILE | 514 | 65.753 | 23.555 | −40.279 | 1.00 | 36.83 | | C |
| ATOM | 4105 | CG2 | ILE | 514 | 66.908 | 24.145 | −41.119 | 1.00 | 36.83 | | C |
| ATOM | 4106 | CG1 | ILE | 514 | 65.701 | 24.178 | −38.876 | 1.00 | 36.83 | | C |
| ATOM | 4107 | CD1 | ILE | 514 | 66.942 | 24.032 | −38.065 | 1.00 | 36.83 | | C |
| ATOM | 4108 | C | ILE | 514 | 64.470 | 23.493 | −42.482 | 1.00 | 36.83 | | C |
| ATOM | 4109 | O | ILE | 514 | 64.540 | 24.414 | −43.303 | 1.00 | 36.83 | | O |
| ATOM | 4110 | N | ASP | 515 | 64.462 | 22.208 | −42.839 | 1.00 | 36.83 | | N |
| ATOM | 4111 | CA | ASP | 515 | 64.520 | 21.819 | −44.247 | 1.00 | 36.83 | | C |
| ATOM | 4112 | CB | ASP | 515 | 64.587 | 20.284 | −44.399 | 1.00 | 36.83 | | C |
| ATOM | 4113 | CG | ASP | 515 | 65.889 | 19.668 | −43.837 | 1.00 | 36.83 | | C |
| ATOM | 4114 | OD1 | ASP | 515 | 65.953 | 18.423 | −43.731 | 1.00 | 36.83 | | O |
| ATOM | 4115 | OD2 | ASP | 515 | 66.847 | 20.406 | −43.502 | 1.00 | 36.83 | | O |
| ATOM | 4116 | C | ASP | 515 | 63.265 | 22.358 | −44.971 | 1.00 | 36.83 | | C |
| ATOM | 4117 | O | ASP | 515 | 63.333 | 22.734 | −46.129 | 1.00 | 36.83 | | O |
| ATOM | 4118 | N | LEU | 516 | 62.122 | 22.412 | −44.294 | 1.00 | 36.83 | | N |
| ATOM | 4119 | CA | LEU | 516 | 60.912 | 22.925 | −44.944 | 1.00 | 36.83 | | C |
| ATOM | 4120 | CB | LEU | 516 | 59.683 | 22.770 | −44.046 | 1.00 | 36.83 | | C |
| ATOM | 4121 | CG | LEU | 516 | 58.429 | 23.554 | −44.474 | 1.00 | 36.83 | | C |
| ATOM | 4122 | CD1 | LEU | 516 | 57.937 | 23.085 | −45.838 | 1.00 | 36.83 | | C |
| ATOM | 4123 | CD2 | LEU | 516 | 57.350 | 23.378 | −43.446 | 1.00 | 36.83 | | C |
| ATOM | 4124 | C | LEU | 516 | 61.037 | 24.389 | −45.342 | 1.00 | 36.83 | | C |
| ATOM | 4125 | O | LEU | 516 | 60.424 | 24.830 | −46.300 | 1.00 | 36.83 | | O |
| ATOM | 4126 | N | ILE | 517 | 61.839 | 25.142 | −44.609 | 1.00 | 36.83 | | N |
| ATOM | 4127 | CA | ILE | 517 | 61.998 | 26.547 | −44.913 | 1.00 | 36.83 | | C |
| ATOM | 4128 | CB | ILE | 517 | 62.180 | 27.380 | −43.605 | 1.00 | 36.83 | | C |
| ATOM | 4129 | CG2 | ILE | 517 | 62.380 | 28.872 | −43.941 | 1.00 | 36.83 | | C |
| ATOM | 4130 | CG1 | ILE | 517 | 60.954 | 27.206 | −42.706 | 1.00 | 36.83 | | C |
| ATOM | 4131 | CD1 | ILE | 517 | 61.140 | 27.752 | −41.314 | 1.00 | 36.83 | | C |
| ATOM | 4132 | C | ILE | 517 | 63.152 | 26.848 | −45.870 | 1.00 | 36.83 | | C |
| ATOM | 4133 | O | ILE | 517 | 62.945 | 27.482 | −46.902 | 1.00 | 36.83 | | O |
| ATOM | 4134 | N | ASP | 518 | 64.357 | 26.389 | −45.537 | 1.00 | 36.83 | | N |
| ATOM | 4135 | CA | ASP | 518 | 65.514 | 26.683 | −46.369 | 1.00 | 36.83 | | C |
| ATOM | 4136 | CB | ASP | 518 | 66.667 | 27.202 | −45.496 | 1.00 | 36.83 | | C |
| ATOM | 4137 | CG | ASP | 518 | 67.335 | 26.108 | −44.666 | 1.00 | 36.83 | | C |
| ATOM | 4138 | OD1 | ASP | 518 | 68.181 | 26.452 | −43.811 | 1.00 | 36.83 | | O |
| ATOM | 4139 | OD2 | ASP | 518 | 67.029 | 24.918 | −44.854 | 1.00 | 36.83 | | O |
| ATOM | 4140 | C | ASP | 518 | 66.039 | 25.601 | −47.307 | 1.00 | 36.83 | | C |
| ATOM | 4141 | O | ASP | 518 | 67.003 | 25.840 | −48.012 | 1.00 | 36.83 | | O |
| ATOM | 4142 | N | GLY | 519 | 65.416 | 24.427 | −47.328 | 1.00 | 36.83 | | N |
| ATOM | 4143 | CA | GLY | 519 | 65.879 | 23.368 | −48.211 | 1.00 | 36.83 | | C |
| ATOM | 4144 | C | GLY | 519 | 66.050 | 23.791 | −49.662 | 1.00 | 36.83 | | C |
| ATOM | 4145 | O | GLY | 519 | 65.244 | 24.545 | −50.198 | 1.00 | 36.83 | | O |
| ATOM | 4146 | N | ARG | 520 | 67.107 | 23.328 | −50.315 | 1.00 | 36.83 | | N |
| ATOM | 4147 | CA | ARG | 520 | 67.295 | 23.693 | −51.710 | 1.00 | 36.83 | | C |
| ATOM | 4148 | CB | ARG | 520 | 68.778 | 23.959 | −52.007 | 1.00 | 36.83 | | C |
| ATOM | 4149 | CG | ARG | 520 | 69.035 | 24.606 | −53.371 | 1.00 | 36.83 | | C |
| ATOM | 4150 | CD | ARG | 520 | 70.511 | 25.016 | −53.558 | 1.00 | 36.83 | | C |
| ATOM | 4151 | NE | ARG | 520 | 71.409 | 23.931 | −53.167 | 1.00 | 36.83 | | N |
| ATOM | 4152 | CZ | ARG | 520 | 71.635 | 22.837 | −53.886 | 1.00 | 36.83 | | C |
| ATOM | 4153 | NH1 | ARG | 520 | 71.038 | 22.675 | −55.063 | 1.00 | 36.83 | | N |
| ATOM | 4154 | NH2 | ARG | 520 | 72.434 | 21.887 | −53.405 | 1.00 | 36.83 | | N |
| ATOM | 4155 | C | ARG | 520 | 66.726 | 22.597 | −52.611 | 1.00 | 36.83 | | C |
| ATOM | 4156 | O | ARG | 520 | 65.926 | 22.880 | −53.503 | 1.00 | 36.83 | | O |
| ATOM | 4157 | N | GLN | 521 | 67.104 | 21.345 | −52.373 | 1.00 | 36.83 | | N |
| ATOM | 4158 | CA | GLN | 521 | 66.588 | 20.238 | −53.180 | 1.00 | 36.83 | | C |
| ATOM | 4159 | CB | GLN | 521 | 67.626 | 19.806 | −54.228 | 1.00 | 36.83 | | C |
| ATOM | 4160 | CG | GLN | 521 | 69.042 | 19.590 | −53.671 | 1.00 | 36.83 | | C |
| ATOM | 4161 | CD | GLN | 521 | 70.053 | 19.222 | −54.754 | 1.00 | 36.83 | | C |
| ATOM | 4162 | OE1 | GLN | 521 | 70.365 | 18.034 | −54.979 | 1.00 | 36.83 | | O |
| ATOM | 4163 | NE2 | GLN | 521 | 70.566 | 20.246 | −55.444 | 1.00 | 36.83 | | N |
| ATOM | 4164 | C | GLN | 521 | 66.216 | 19.038 | −52.310 | 1.00 | 36.83 | | C |
| ATOM | 4165 | O | GLN | 521 | 67.086 | 18.437 | −51.679 | 1.00 | 36.83 | | O |
| ATOM | 4166 | N | PRO | 522 | 64.913 | 18.693 | −52.235 | 1.00 | 36.83 | | N |
| ATOM | 4167 | CD | PRO | 522 | 64.405 | 17.640 | −51.337 | 1.00 | 36.83 | | C |
| ATOM | 4168 | CA | PRO | 522 | 63.809 | 19.364 | −52.925 | 1.00 | 36.83 | | C |
| ATOM | 4169 | CB | PRO | 522 | 62.613 | 18.479 | −52.597 | 1.00 | 36.83 | | C |
| ATOM | 4170 | CG | PRO | 522 | 62.939 | 17.983 | −51.218 | 1.00 | 36.83 | | C |
| ATOM | 4171 | C | PRO | 522 | 63.662 | 20.783 | −52.382 | 1.00 | 36.83 | | C |
| ATOM | 4172 | O | PRO | 522 | 64.021 | 21.049 | −51.237 | 1.00 | 36.83 | | O |
| ATOM | 4173 | N | PRO | 523 | 63.131 | 21.708 | −53.198 | 1.00 | 36.83 | | N |
| ATOM | 4174 | CD | PRO | 523 | 62.677 | 21.507 | −54.585 | 1.00 | 36.83 | | C |
| ATOM | 4175 | CA | PRO | 523 | 62.950 | 23.107 | −52.785 | 1.00 | 36.83 | | C |
| ATOM | 4176 | CB | PRO | 523 | 62.500 | 23.788 | −54.073 | 1.00 | 36.83 | | C |
| ATOM | 4177 | CG | PRO | 523 | 61.784 | 22.698 | −54.795 | 1.00 | 36.83 | | C |
| ATOM | 4178 | C | PRO | 523 | 62.020 | 23.416 | −51.609 | 1.00 | 36.83 | | C |
| ATOM | 4179 | O | PRO | 523 | 60.856 | 23.043 | −51.606 | 1.00 | 36.83 | | O |
| ATOM | 4180 | N | GLY | 524 | 62.549 | 24.100 | −50.605 | 1.00 | 36.83 | | N |
| ATOM | 4181 | CA | GLY | 524 | 61.728 | 24.493 | −49.470 | 1.00 | 36.83 | | C |
| ATOM | 4182 | C | GLY | 524 | 60.944 | 25.770 | −49.800 | 1.00 | 36.83 | | C |
| ATOM | 4183 | O | GLY | 524 | 60.937 | 26.232 | −50.939 | 1.00 | 36.83 | | O |
| ATOM | 4184 | N | ILE | 525 | 60.290 | 26.352 | −48.801 | 1.00 | 36.83 | | N |
| ATOM | 4185 | CA | ILE | 525 | 59.504 | 27.563 | −48.991 | 1.00 | 36.83 | | C |
| ATOM | 4186 | CB | ILE | 525 | 58.842 | 27.985 | −47.658 | 1.00 | 36.83 | | C |
| ATOM | 4187 | CG2 | ILE | 525 | 58.045 | 29.289 | −47.833 | 1.00 | 36.83 | | C |
| ATOM | 4188 | CG1 | ILE | 525 | 57.941 | 26.849 | −47.160 | 1.00 | 36.83 | | C |
| ATOM | 4189 | CD1 | ILE | 525 | 57.292 | 27.107 | −45.816 | 1.00 | 36.83 | | C |
| ATOM | 4190 | C | ILE | 525 | 60.318 | 28.733 | −49.554 | 1.00 | 36.83 | | C |
| ATOM | 4191 | O | ILE | 525 | 59.950 | 29.304 | −50.591 | 1.00 | 36.83 | | O |
| ATOM | 4192 | N | LEU | 526 | 61.420 | 29.090 | −48.891 | 1.00 | 36.83 | | N |
| ATOM | 4193 | CA | LEU | 526 | 62.242 | 30.204 | −49.353 | 1.00 | 36.83 | | C |
| ATOM | 4194 | CB | LEU | 526 | 63.423 | 30.439 | −48.403 | 1.00 | 36.83 | | C |
| ATOM | 4195 | CG | LEU | 526 | 63.118 | 30.892 | −46.966 | 1.00 | 36.83 | | C |
| ATOM | 4196 | CD1 | LEU | 526 | 64.420 | 31.221 | −46.258 | 1.00 | 36.83 | | C |
| ATOM | 4197 | CD2 | LEU | 526 | 62.214 | 32.091 | −46.977 | 1.00 | 36.83 | | C |
| ATOM | 4198 | C | LEU | 526 | 62.747 | 30.034 | −50.789 | 1.00 | 36.83 | | C |
| ATOM | 4199 | O | LEU | 526 | 62.922 | 31.017 | −51.499 | 1.00 | 36.83 | | O |
| ATOM | 4200 | N | ALA | 527 | 62.971 | 28.792 | −51.217 | 1.00 | 36.83 | | N |
| ATOM | 4201 | CA | ALA | 527 | 63.425 | 28.521 | −52.584 | 1.00 | 36.83 | | C |
| ATOM | 4202 | CB | ALA | 527 | 63.879 | 27.081 | −52.721 | 1.00 | 36.83 | | C |
| ATOM | 4203 | C | ALA | 527 | 62.272 | 28.797 | −53.545 | 1.00 | 36.83 | | C |
| ATOM | 4204 | O | ALA | 527 | 62.434 | 29.483 | −54.560 | 1.00 | 36.83 | | O |
| ATOM | 4205 | N | LEU | 528 | 61.098 | 28.273 | −53.210 | 1.00 | 36.83 | | N |
| ATOM | 4206 | CA | LEU | 528 | 59.924 | 28.484 | −54.050 | 1.00 | 36.83 | | C |
| ATOM | 4207 | CB | LEU | 528 | 58.749 | 27.634 | −53.535 | 1.00 | 36.83 | | C |
| ATOM | 4208 | CG | LEU | 528 | 58.961 | 26.116 | −53.673 | 1.00 | 36.83 | | C |
| ATOM | 4209 | CD1 | LEU | 528 | 57.831 | 25.359 | −53.022 | 1.00 | 36.83 | | C |
| ATOM | 4210 | CD2 | LEU | 528 | 59.073 | 25.742 | −55.157 | 1.00 | 36.83 | | C |
| ATOM | 4211 | C | LEU | 528 | 59.561 | 29.977 | −54.106 | 1.00 | 36.83 | | C |
| ATOM | 4212 | O | LEU | 528 | 59.130 | 30.479 | −55.146 | 1.00 | 36.83 | | O |
| ATOM | 4213 | N | LEU | 529 | 59.753 | 30.691 | −52.998 | 1.00 | 36.83 | | N |
| ATOM | 4214 | CA | LEU | 529 | 59.456 | 32.119 | −52.971 | 1.00 | 36.83 | | C |
| ATOM | 4215 | CB | LEU | 529 | 59.638 | 32.692 | −51.558 | 1.00 | 36.83 | | C |
| ATOM | 4216 | CG | LEU | 529 | 59.721 | 34.230 | −51.445 | 1.00 | 36.83 | | C |
| ATOM | 4217 | CD1 | LEU | 529 | 58.376 | 34.877 | −51.745 | 1.00 | 36.83 | | C |
| ATOM | 4218 | CD2 | LEU | 529 | 60.177 | 34.610 | −50.051 | 1.00 | 36.83 | | C |
| ATOM | 4219 | C | LEU | 529 | 60.377 | 32.858 | −53.936 | 1.00 | 36.83 | | C |
| ATOM | 4220 | O | LEU | 529 | 59.932 | 33.754 | −54.655 | 1.00 | 36.83 | | O |
| ATOM | 4221 | N | ASP | 530 | 61.661 | 32.488 | −53.946 | 1.00 | 36.83 | | N |
| ATOM | 4222 | CA | ASP | 530 | 62.640 | 33.133 | −54.825 | 1.00 | 36.83 | | C |
| ATOM | 4223 | CB | ASP | 530 | 64.059 | 32.630 | −54.529 | 1.00 | 36.83 | | C |
| ATOM | 4224 | CG | ASP | 530 | 64.659 | 33.262 | −53.286 | 1.00 | 36.83 | | C |
| ATOM | 4225 | OD1 | ASP | 530 | 63.983 | 34.102 | −52.646 | 1.00 | 36.83 | | O |
| ATOM | 4226 | OD2 | ASP | 530 | 65.816 | 32.922 | −52.952 | 1.00 | 36.83 | | O |
| ATOM | 4227 | C | ASP | 530 | 62.312 | 32.878 | −56.289 | 1.00 | 36.83 | | C |
| ATOM | 4228 | O | ASP | 530 | 62.344 | 33.793 | −57.108 | 1.00 | 36.83 | | O |
| ATOM | 4229 | N | GLU | 531 | 62.006 | 31.622 | −56.601 | 1.00 | 36.83 | | N |
| ATOM | 4230 | CA | GLU | 531 | 61.657 | 31.230 | −57.958 | 1.00 | 36.83 | | C |
| ATOM | 4231 | CB | GLU | 531 | 61.297 | 29.750 | −57.973 | 1.00 | 36.83 | | C |
| ATOM | 4232 | CG | GLU | 531 | 60.848 | 29.219 | −59.308 | 1.00 | 36.83 | | C |
| ATOM | 4233 | CD | GLU | 531 | 60.413 | 27.764 | −59.208 | 1.00 | 36.83 | | C |
| ATOM | 4234 | OE1 | GLU | 531 | 61.269 | 26.893 | −58.904 | 1.00 | 36.83 | | O |
| ATOM | 4235 | OE2 | GLU | 531 | 59.212 | 27.495 | −59.421 | 1.00 | 36.83 | | O |
| ATOM | 4236 | C | GLU | 531 | 60.480 | 32.080 | −58.439 | 1.00 | 36.83 | | C |
| ATOM | 4237 | O | GLU | 531 | 60.484 | 32.588 | −59.552 | 1.00 | 36.83 | | O |
| ATOM | 4238 | N | GLN | 532 | 59.481 | 32.249 | −57.584 | 1.00 | 36.83 | | N |
| ATOM | 4239 | CA | GLN | 532 | 58.326 | 33.053 | −57.942 | 1.00 | 36.83 | | C |
| ATOM | 4240 | CB | GLN | 532 | 57.229 | 32.890 | −56.895 | 1.00 | 36.83 | | C |
| ATOM | 4241 | CG | GLN | 532 | 56.484 | 31.568 | −56.963 | 1.00 | 36.83 | | C |
| ATOM | 4242 | CD | GLN | 532 | 55.302 | 31.632 | −57.907 | 1.00 | 36.83 | | C |
| ATOM | 4243 | OE1 | GLN | 532 | 54.374 | 32.415 | −57.700 | 1.00 | 36.83 | | O |
| ATOM | 4244 | NE2 | GLN | 532 | 55.330 | 30.817 | −58.952 | 1.00 | 36.83 | | N |
| ATOM | 4245 | C | GLN | 532 | 58.745 | 34.518 | −58.044 | 1.00 | 36.83 | | C |
| ATOM | 4246 | O | GLN | 532 | 58.211 | 35.274 | −58.857 | 1.00 | 36.83 | | O |
| ATOM | 4247 | N | SER | 533 | 59.705 | 34.917 | −57.220 | 1.00 | 36.83 | | N |
| ATOM | 4248 | CA | SER | 533 | 60.176 | 36.298 | −57.227 | 1.00 | 36.83 | | C |
| ATOM | 4249 | CB | SER | 533 | 61.230 | 36.519 | −56.141 | 1.00 | 36.83 | | C |
| ATOM | 4250 | OG | SER | 533 | 60.620 | 36.803 | −54.898 | 1.00 | 36.83 | | O |
| ATOM | 4251 | C | SER | 533 | 60.749 | 36.711 | −58.571 | 1.00 | 36.83 | | C |
| ATOM | 4252 | O | SER | 533 | 60.685 | 37.878 | −58.939 | 1.00 | 36.83 | | O |
| ATOM | 4253 | N | VAL | 534 | 61.299 | 35.747 | −59.300 | 1.00 | 36.83 | | N |
| ATOM | 4254 | CA | VAL | 534 | 61.891 | 36.009 | −60.603 | 1.00 | 36.83 | | C |
| ATOM | 4255 | CB | VAL | 534 | 63.165 | 35.157 | −60.814 | 1.00 | 36.83 | | C |
| ATOM | 4256 | CG1 | VAL | 534 | 64.219 | 35.512 | −59.784 | 1.00 | 36.83 | | C |
| ATOM | 4257 | CG2 | VAL | 534 | 62.823 | 33.695 | −60.716 | 1.00 | 36.83 | | C |
| ATOM | 4258 | C | VAL | 534 | 60.933 | 35.729 | −61.763 | 1.00 | 36.83 | | C |
| ATOM | 4259 | O | VAL | 534 | 61.270 | 36.004 | −62.914 | 1.00 | 36.83 | | O |
| ATOM | 4260 | N | PHE | 535 | 59.763 | 35.163 | −61.472 | 1.00 | 36.83 | | N |
| ATOM | 4261 | CA | PHE | 535 | 58.776 | 34.874 | −62.509 | 1.00 | 36.83 | | C |
| ATOM | 4262 | CB | PHE | 535 | 57.860 | 33.721 | −62.096 | 1.00 | 36.83 | | C |
| ATOM | 4263 | CG | PHE | 535 | 56.862 | 33.338 | −63.150 | 1.00 | 36.83 | | C |
| ATOM | 4264 | CD1 | PHE | 535 | 57.283 | 32.870 | −64.385 | 1.00 | 36.83 | | C |
| ATOM | 4265 | CD2 | PRE | 535 | 55.496 | 33.467 | −62.920 | 1.00 | 36.83 | | C |
| ATOM | 4266 | CE1 | PHE | 535 | 56.367 | 32.540 | −65.368 | 1.00 | 36.83 | | C |
| ATOM | 4267 | CE2 | PHE | 535 | 54.564 | 33.137 | −63.911 | 1.00 | 36.83 | | C |
| ATOM | 4268 | CZ | PHE | 535 | 55.003 | 32.675 | −65.129 | 1.00 | 36.83 | | C |
| ATOM | 4269 | C | PHE | 535 | 57.955 | 36.141 | −62.725 | 1.00 | 36.83 | | C |
| ATOM | 4270 | O | PHE | 535 | 57.207 | 36.570 | −61.850 | 1.00 | 36.83 | | O |
| ATOM | 4271 | N | PRO | 536 | 58.086 | 36.753 | −63.915 | 1.00 | 36.83 | | N |
| ATOM | 4272 | CD | PRO | 536 | 58.798 | 36.146 | −65.058 | 1.00 | 36.83 | | C |
| ATOM | 4273 | CA | PRO | 536 | 57.403 | 37.991 | −64.329 | 1.00 | 36.83 | | C |
| ATOM | 4274 | CB | PRO | 536 | 57.615 | 38.016 | −65.849 | 1.00 | 36.83 | | C |
| ATOM | 4275 | CG | PRO | 536 | 58.914 | 37.315 | −66.020 | 1.00 | 36.83 | | C |
| ATOM | 4276 | C | PRO | 536 | 55.931 | 38.137 | −63.954 | 1.00 | 36.83 | | C |
| ATOM | 4277 | O | PRO | 536 | 55.548 | 39.126 | −63.345 | 1.00 | 36.83 | | O |
| ATOM | 4278 | N | ASN | 537 | 55.120 | 37.151 | −64.319 | 1.00 | 36.83 | | N |
| ATOM | 4279 | CA | ASN | 537 | 53.680 | 37.151 | −64.070 | 1.00 | 36.83 | | C |
| ATOM | 4280 | CB | ASN | 537 | 52.992 | 36.320 | −65.165 | 1.00 | 36.83 | | C |
| ATOM | 4281 | CG | ASN | 537 | 53.451 | 36.711 | −66.574 | 1.00 | 36.83 | | C |
| ATOM | 4282 | OD1 | ASN | 537 | 53.508 | 37.894 | −66.905 | 1.00 | 36.83 | | O |
| ATOM | 4283 | ND2 | ASN | 537 | 53.773 | 35.716 | −67.405 | 1.00 | 36.83 | | N |
| ATOM | 4284 | C | ASN | 537 | 53.252 | 36.616 | −62.701 | 1.00 | 36.83 | | C |
| ATOM | 4285 | O | ASN | 537 | 52.069 | 36.342 | −62.481 | 1.00 | 36.83 | | O |
| ATOM | 4286 | N | ALA | 538 | 54.193 | 36.468 | −61.776 | 1.00 | 36.83 | | N |
| ATOM | 4287 | CA | ALA | 538 | 53.856 | 35.938 | −60.459 | 1.00 | 36.83 | | C |
| ATOM | 4288 | CB | ALA | 538 | 55.126 | 35.625 | −59.668 | 1.00 | 36.83 | | C |
| ATOM | 4289 | C | ALA | 538 | 52.968 | 36.857 | −59.648 | 1.00 | 36.83 | | C |
| ATOM | 4290 | O | ALA | 538 | 53.003 | 38.070 | −59.810 | 1.00 | 36.83 | | O |
| ATOM | 4291 | N | THR | 539 | 52.161 | 36.251 | −58.780 | 1.00 | 36.83 | | N |
| ATOM | 4292 | CA | THR | 539 | 51.267 | 36.981 | −57.882 | 1.00 | 36.83 | | C |
| ATOM | 4293 | CB | THR | 539 | 49.812 | 36.938 | −58.356 | 1.00 | 36.83 | | C |
| ATOM | 4294 | OG1 | THR | 539 | 49.405 | 35.573 | −58.466 | 1.00 | 36.83 | | O |
| ATOM | 4295 | CG2 | THR | 539 | 49.648 | 37.645 | −59.690 | 1.00 | 36.83 | | C |
| ATOM | 4296 | C | TER | 539 | 51.304 | 36.299 | −56.508 | 1.00 | 36.83 | | C |
| ATOM | 4297 | O | THR | 539 | 51.795 | 35.180 | −56.382 | 1.00 | 36.83 | | O |
| ATOM | 4298 | N | ASP | 540 | 50.782 | 36.966 | −55.485 | 1.00 | 36.83 | | N |
| ATOM | 4299 | CA | ASP | 540 | 50.753 | 36.368 | −54.165 | 1.00 | 36.83 | | C |
| ATOM | 4300 | CB | ASP | 540 | 50.212 | 37.359 | −53.128 | 1.00 | 36.83 | | C |
| ATOM | 4301 | CG | ASP | 540 | 51.192 | 38.489 | −52.823 | 1.00 | 36.83 | | C |
| ATOM | 4302 | OD1 | ASP | 540 | 52.404 | 38.351 | −53.130 | 1.00 | 36.83 | | O |
| ATOM | 4303 | OD2 | ASP | 540 | 50.743 | 39.519 | −52.265 | 1.00 | 36.83 | | O |
| ATOM | 4304 | C | ASP | 540 | 49.869 | 35.128 | −54.209 | 1.00 | 36.83 | | C |
| ATOM | 4305 | O | ASP | 540 | 50.080 | 34.180 | −53.457 | 1.00 | 36.83 | | O |
| ATOM | 4306 | N | ASN | 541 | 48.894 | 35.135 | −55.115 | 1.00 | 36.83 | | N |
| ATOM | 4307 | CA | ASN | 541 | 47.965 | 34.017 | −55.279 | 1.00 | 36.83 | | C |
| ATOM | 4308 | CB | ASN | 541 | 46.764 | 34.448 | −56.144 | 1.00 | 36.83 | | C |
| ATOM | 4309 | CG | ASN | 541 | 46.118 | 35.772 | −55.661 | 1.00 | 36.83 | | C |
| ATOM | 4310 | OD1 | ASN | 541 | 45.306 | 35.787 | −54.734 | 1.00 | 36.83 | | O |
| ATOM | 4311 | ND2 | ASN | 541 | 46.497 | 36.885 | −56.296 | 1.00 | 36.83 | | N |
| ATOM | 4312 | C | ASN | 541 | 48.690 | 32.823 | −55.922 | 1.00 | 36.83 | | C |
| ATOM | 4313 | O | ASN | 541 | 48.491 | 31.679 | −55.509 | 1.00 | 36.83 | | O |
| ATOM | 4314 | N | THR | 542 | 49.533 | 33.075 | −56.923 | 1.00 | 36.83 | | N |
| ATOM | 4315 | CA | THR | 542 | 50.274 | 31.970 | −57.553 | 1.00 | 36.83 | | C |
| ATOM | 4316 | CB | THR | 542 | 51.000 | 32.392 | −58.855 | 1.00 | 36.83 | | C |
| ATOM | 4317 | OG1 | THR | 542 | 51.889 | 33.476 | −58.573 | 1.00 | 36.83 | | O |
| ATOM | 4318 | CG2 | THR | 542 | 49.997 | 32.812 | −59.927 | 1.00 | 36.83 | | C |
| ATOM | 4319 | C | THR | 542 | 51.332 | 31.438 | −56.586 | 1.00 | 36.83 | | C |
| ATOM | 4320 | O | THR | 542 | 51.645 | 30.254 | −56.593 | 1.00 | 36.83 | | O |
| ATOM | 4321 | N | LEU | 543 | 51.894 | 32.315 | −55.759 | 1.00 | 36.83 | | N |
| ATOM | 4322 | CA | LEU | 543 | 52.891 | 31.874 | −54.793 | 1.00 | 36.83 | | C |
| ATOM | 4323 | CB | LEU | 543 | 53.546 | 33.077 | −54.109 | 1.00 | 36.83 | | C |
| ATOM | 4324 | CG | LEU | 543 | 54.352 | 32.772 | −52.843 | 1.00 | 36.83 | | C |
| ATOM | 4325 | CD1 | LEU | 543 | 55.529 | 31.877 | −53.155 | 1.00 | 36.83 | | C |
| ATOM | 4326 | CD2 | LEU | 543 | 54.822 | 34.088 | −52.245 | 1.00 | 36.83 | | C |
| ATOM | 4327 | C | LEU | 543 | 52.320 | 30.908 | −53.727 | 1.00 | 36.83 | | C |
| ATOM | 4328 | O | LEU | 543 | 52.924 | 29.863 | −53.466 | 1.00 | 36.83 | | O |
| ATOM | 4329 | N | ILE | 544 | 51.173 | 31.241 | −53.130 | 1.00 | 36.83 | | N |
| ATOM | 4330 | CA | ILE | 544 | 50.567 | 30.383 | −52.108 | 1.00 | 36.83 | | C |
| ATOM | 4331 | CB | ILE | 544 | 49.315 | 31.064 | −51.434 | 1.00 | 36.83 | | C |
| ATOM | 4332 | CG2 | ILE | 544 | 48.186 | 31.237 | −52.444 | 1.00 | 36.83 | | C |
| ATOM | 4333 | CG1 | ILE | 544 | 48.784 | 30.222 | −50.269 | 1.00 | 36.83 | | C |
| ATOM | 4334 | CD1 | ILE | 544 | 49.612 | 30.264 | −49.038 | 1.00 | 36.83 | | C |
| ATOM | 4335 | C | ILE | 544 | 50.164 | 29.060 | −52.751 | 1.00 | 36.83 | | C |
| ATOM | 4336 | O | ILE | 544 | 50.324 | 27.993 | −52.150 | 1.00 | 36.83 | | O |
| ATOM | 4337 | N | THR | 545 | 49.662 | 29.129 | −53.980 | 1.00 | 36.83 | | N |
| ATOM | 4338 | CA | THR | 545 | 49.247 | 27.933 | −54.705 | 1.00 | 36.83 | | C |
| ATOM | 4339 | CB | THR | 545 | 48.558 | 28.294 | −56.054 | 1.00 | 36.83 | | C |
| ATOM | 4340 | OG1 | THR | 545 | 47.459 | 29.174 | −55.809 | 1.00 | 36.83 | | O |
| ATOM | 4341 | CG2 | TER | 545 | 48.030 | 27.058 | −56.741 | 1.00 | 36.83 | | C |
| ATOM | 4342 | C | THR | 545 | 50.466 | 27.054 | −54.964 | 1.00 | 36.83 | | C |
| ATOM | 4343 | O | THR | 545 | 50.390 | 25.833 | −54.895 | 1.00 | 36.83 | | O |
| ATOM | 4344 | N | LYS | 546 | 51.598 | 27.679 | −55.254 | 1.00 | 36.83 | | N |
| ATOM | 4345 | CA | LYS | 546 | 52.815 | 26.919 | −55.488 | 1.00 | 36.83 | | C |
| ATOM | 4346 | CB | LYS | 546 | 53.937 | 27.838 | −55.973 | 1.00 | 36.83 | | C |
| ATOM | 4347 | CG | LYS | 546 | 55.241 | 27.118 | −56.287 | 1.00 | 36.83 | | C |
| ATOM | 4348 | CD | LYS | 546 | 55.107 | 26.221 | −57.509 | 1.00 | 36.83 | | C |
| ATOM | 4349 | CE | LYS | 546 | 56.454 | 25.630 | −57.929 | 1.00 | 36.83 | | C |
| ATOM | 4350 | NZ | LYS | 546 | 56.311 | 24.541 | −58.960 | 1.00 | 36.83 | | N |
| ATOM | 4351 | C | LYS | 546 | 53.219 | 26.244 | −54.186 | 1.00 | 36.83 | | C |
| ATOM | 4352 | O | LYS | 546 | 53.589 | 25.072 | −54.177 | 1.00 | 36.83 | | O |
| ATOM | 4353 | N | LEU | 547 | 53.141 | 26.983 | −53.084 | 1.00 | 36.83 | | N |
| ATOM | 4354 | CA | LEU | 547 | 53.502 | 26.431 | −51.782 | 1.00 | 36.83 | | C |
| ATOM | 4355 | CB | LEU | 547 | 53.449 | 27.513 | −50.696 | 1.00 | 36.83 | | C |
| ATOM | 4356 | CG | LEU | 547 | 54.416 | 28.695 | −50.820 | 1.00 | 36.83 | | C |
| ATOM | 4357 | CD1 | LEU | 547 | 54.166 | 29.677 | −49.686 | 1.00 | 36.83 | | C |
| ATOM | 4358 | CD2 | LEU | 547 | 55.862 | 28.204 | −50.780 | 1.00 | 36.83 | | C |
| ATOM | 4359 | C | LEU | 547 | 52.601 | 25.255 | −51.404 | 1.00 | 36.83 | | C |
| ATOM | 4360 | O | LEU | 547 | 53.096 | 24.208 | −50.992 | 1.00 | 36.83 | | O |
| ATOM | 4361 | N | HIS | 548 | 51.284 | 25.413 | −51.539 | 1.00 | 36.83 | | N |
| ATOM | 4362 | CA | HIS | 548 | 50.373 | 24.306 | −51.220 | 1.00 | 36.83 | | C |
| ATOM | 4363 | CB | HIS | 548 | 48.903 | 24.705 | −51.397 | 1.00 | 36.83 | | C |
| ATOM | 4364 | CG | HIS | 548 | 48.423 | 25.723 | −50.414 | 1.00 | 36.83 | | C |
| ATOM | 4365 | CD2 | HIS | 548 | 47.567 | 26.759 | −50.555 | 1.00 | 36.83 | | C |
| ATOM | 4366 | ND1 | HIS | 548 | 48.812 | 25.723 | −49.093 | 1.00 | 36.83 | | N |
| ATOM | 4367 | CE1 | HIS | 548 | 48.217 | 26.719 | −48.462 | 1.00 | 36.83 | | C |
| ATOM | 4368 | NE2 | HIS | 548 | 47.455 | 27.363 | −49.326 | 1.00 | 36.83 | | N |
| ATOM | 4369 | C | HIS | 548 | 50.634 | 23.110 | −52.130 | 1.00 | 36.83 | | C |
| ATOM | 4370 | O | HIS | 548 | 50.587 | 21.954 | −51.699 | 1.00 | 36.83 | | O |
| ATOM | 4371 | N | SER | 549 | 50.911 | 23.388 | −53.392 | 1.00 | 36.83 | | N |
| ATOM | 4372 | CA | SER | 549 | 51.136 | 22.308 | −54.333 | 1.00 | 36.83 | | C |
| ATOM | 4373 | CB | SER | 549 | 51.355 | 22.865 | −55.735 | 1.00 | 36.83 | | C |
| ATOM | 4374 | OG | SER | 549 | 51.425 | 21.807 | −56.670 | 1.00 | 36.83 | | O |
| ATOM | 4375 | C | SER | 549 | 52.316 | 21.430 | −53.926 | 1.00 | 36.83 | | C |
| ATOM | 4376 | O | SER | 549 | 52.284 | 20.215 | −54.105 | 1.00 | 36.83 | | O |
| ATOM | 4377 | N | HIS | 550 | 53.351 | 22.038 | −53.362 | 1.00 | 36.83 | | N |
| ATOM | 4378 | CA | HIS | 550 | 54.511 | 21.270 | −52.953 | 1.00 | 36.83 | | C |
| ATOM | 4379 | CB | HIS | 550 | 55.766 | 22.140 | −52.973 | 1.00 | 36.83 | | C |
| ATOM | 4380 | CG | HIS | 550 | 56.292 | 22.424 | −54.347 | 1.00 | 36.83 | | C |
| ATOM | 4381 | CD2 | HIS | 550 | 55.733 | 23.064 | −55.401 | 1.00 | 36.83 | | C |
| ATOM | 4382 | ND1 | HIS | 550 | 57.575 | 22.100 | −54.732 | 1.00 | 36.83 | | N |
| ATOM | 4383 | CE1 | HIS | 550 | 57.785 | 22.334 | −55.961 | 1.00 | 36.83 | | C |
| ATOM | 4384 | NE2 | HIS | 550 | 56.682 | 23.123 | −56.388 | 1.00 | 36.83 | | N |
| ATOM | 4385 | C | HIS | 550 | 54.418 | 20.608 | −51.587 | 1.00 | 36.83 | | C |
| ATOM | 4386 | O | HIS | 550 | 54.818 | 19.458 | −51.432 | 1.00 | 36.83 | | O |
| ATOM | 4387 | N | PHE | 551 | 53.855 | 21.310 | −50.608 | 1.00 | 36.83 | | N |
| ATOM | 4388 | CA | PHE | 551 | 53.823 | 20.787 | −49.247 | 1.00 | 36.83 | | C |
| ATOM | 4389 | CB | PHE | 551 | 54.489 | 21.816 | −48.326 | 1.00 | 36.83 | | C |
| ATOM | 4390 | CG | PINE | 551 | 55.773 | 22.361 | −48.879 | 1.00 | 36.83 | | C |
| ATOM | 4391 | CD1 | PHE | 551 | 56.855 | 21.517 | −49.116 | 1.00 | 36.83 | | C |
| ATOM | 4392 | CD2 | PHE | 551 | 55.890 | 23.712 | −49.200 | 1.00 | 36.83 | | C |
| ATOM | 4393 | CE1 | PHE | 551 | 58.027 | 22.008 | −49.666 | 1.00 | 36.83 | | C |
| ATOM | 4394 | CE2 | PHE | 551 | 57.060 | 24.220 | −49.752 | 1.00 | 36.83 | | C |
| ATOM | 4395 | CZ | PHE | 551 | 58.133 | 23.373 | −49.989 | 1.00 | 36.83 | | C |
| ATOM | 4396 | C | PHE | 551 | 52.520 | 20.311 | −48.618 | 1.00 | 36.83 | | C |
| ATOM | 4397 | O | PHE | 551 | 52.551 | 19.567 | −47.645 | 1.00 | 36.83 | | O |
| ATOM | 4398 | N | SER | 552 | 51.378 | 20.711 | −49.152 | 1.00 | 36.83 | | N |
| ATOM | 4399 | CA | SER | 552 | 50.124 | 20.280 | −48.550 | 1.00 | 36.83 | | C |
| ATOM | 4400 | CB | SER | 552 | 48.955 | 20.917 | −49.274 | 1.00 | 36.83 | | C |
| ATOM | 4401 | OG | SER | 552 | 47.766 | 20.579 | −48.605 | 1.00 | 36.83 | | O |
| ATOM | 4402 | C | SER | 552 | 49.951 | 18.757 | −48.530 | 1.00 | 36.83 | | C |
| ATOM | 4403 | O | SER | 552 | 50.056 | 18.093 | −49.559 | 1.00 | 36.83 | | O |
| ATOM | 4404 | N | LYS | 553 | 49.671 | 18.213 | −47.352 | 1.00 | 36.83 | | N |
| ATOM | 4405 | CA | LYS | 553 | 49.489 | 16.768 | −47.198 | 1.00 | 36.83 | | C |
| ATOM | 4406 | CB | LYS | 553 | 48.267 | 16.283 | −47.991 | 1.00 | 36.83 | | C |
| ATOM | 4407 | CG | LYS | 553 | 46.945 | 16.820 | −47.458 | 1.00 | 36.83 | | C |
| ATOM | 4408 | CD | LYS | 553 | 45.769 | 16.199 | −48.174 | 1.00 | 36.83 | | C |
| ATOM | 4409 | CE | LYS | 553 | 44.582 | 17.158 | −48.235 | 1.00 | 36.83 | | C |
| ATOM | 4410 | NZ | LYS | 553 | 44.897 | 18.311 | −49.139 | 1.00 | 36.83 | | N |
| ATOM | 4411 | C | LYS | 553 | 50.725 | 15.982 | −47.629 | 1.00 | 36.83 | | C |
| ATOM | 4412 | O | LYS | 553 | 50.631 | 14.823 | −48.033 | 1.00 | 36.83 | | O |
| ATOM | 4413 | N | LYS | 554 | 51.887 | 16.619 | −47.545 | 1.00 | 36.83 | | N |
| ATOM | 4414 | CA | LYS | 554 | 53.124 | 15.953 | −47.911 | 1.00 | 36.83 | | C |
| ATOM | 4415 | CB | LYS | 554 | 53.602 | 16.447 | −49.274 | 1.00 | 36.83 | | C |
| ATOM | 4416 | CG | LYS | 554 | 52.607 | 16.193 | −50.377 | 1.00 | 36.83 | | C |
| ATOM | 4417 | CD | LYS | 554 | 53.246 | 16.382 | −51.731 | 1.00 | 36.83 | | C |
| ATOM | 4418 | CE | LYS | 554 | 52.215 | 16.658 | −52.789 | 1.00 | 36.83 | | C |
| ATOM | 4419 | NZ | LYS | 554 | 52.868 | 17.238 | −53.991 | 1.00 | 36.83 | | N |
| ATOM | 4420 | C | LYS | 554 | 54.186 | 16.180 | −46.843 | 1.00 | 36.83 | | C |
| ATOM | 4421 | O | LYS | 554 | 54.854 | 15.250 | −46.411 | 1.00 | 36.83 | | O |
| ATOM | 4422 | N | ASN | 555 | 54.335 | 17.420 | −46.400 | 1.00 | 36.83 | | N |
| ATOM | 4423 | CA | ASN | 555 | 55.308 | 17.708 | −45.363 | 1.00 | 36.83 | | C |
| ATOM | 4424 | CB | ASN | 555 | 56.021 | 19.028 | −45.646 | 1.00 | 36.83 | | C |
| ATOM | 4425 | CG | ASN | 555 | 57.250 | 19.211 | −44.791 | 1.00 | 36.83 | | C |
| ATOM | 4426 | OD1 | ASN | 555 | 58.352 | 19.414 | −45.302 | 1.00 | 36.83 | | O |
| ATOM | 4427 | ND2 | ASN | 555 | 57.074 | 19.137 | −43.478 | 1.00 | 36.83 | | N |
| ATOM | 4428 | C | ASN | 555 | 54.564 | 17.771 | −44.036 | 1.00 | 36.83 | | C |
| ATOM | 4429 | O | ASN | 555 | 53.637 | 18.557 | −43.869 | 1.00 | 36.83 | | O |
| ATOM | 4430 | N | ALA | 556 | 54.983 | 16.931 | −43.098 | 1.00 | 36.83 | | N |
| ATOM | 4431 | CA | ALA | 556 | 54.376 | 16.855 | −41.781 | 1.00 | 36.83 | | C |
| ATOM | 4432 | CB | ALA | 556 | 54.961 | 15.662 | −41.010 | 1.00 | 36.83 | | C |
| ATOM | 4433 | C | ALA | 556 | 54.518 | 18.129 | −40.950 | 1.00 | 36.83 | | C |
| ATOM | 4434 | O | ALA | 556 | 53.936 | 18.227 | −39.884 | 1.00 | 36.83 | | O |
| ATOM | 4435 | N | LYS | 557 | 55.293 | 19.100 | −41.417 | 1.00 | 36.83 | | N |
| ATOM | 4436 | CA | LYS | 557 | 55.436 | 20.340 | −40.662 | 1.00 | 36.83 | | C |
| ATOM | 4437 | CB | LYS | 557 | 56.916 | 20.715 | −40.521 | 1.00 | 36.83 | | C |
| ATOM | 4438 | CG | LYS | 557 | 57.781 | 19.689 | −39.821 | 1.00 | 36.83 | | C |
| ATOM | 4439 | CD | LYS | 557 | 57.314 | 19.428 | −38.407 | 1.00 | 36.83 | | C |
| ATOM | 4440 | CE | LYS | 557 | 58.224 | 18.436 | −37.709 | 1.00 | 36.83 | | C |
| ATOM | 4441 | NZ | LYS | 557 | 57.904 | 18.315 | −36.266 | 1.00 | 36.83 | | N |
| ATOM | 4442 | C | LYS | 557 | 54.678 | 21.486 | −41.350 | 1.00 | 36.83 | | C |
| ATOM | 4443 | O | LYS | 557 | 54.693 | 22.631 | −40.888 | 1.00 | 36.83 | | O |
| ATOM | 4444 | N | TYR | 558 | 54.014 | 21.163 | −42.456 | 1.00 | 36.83 | | N |
| ATOM | 4445 | CA | TYR | 558 | 53.268 | 22.148 | −43.220 | 1.00 | 36.83 | | C |
| ATOM | 4446 | CB | TYR | 558 | 53.731 | 22.110 | −44.671 | 1.00 | 36.83 | | C |
| ATOM | 4447 | CG | TYR | 558 | 53.128 | 23.177 | −45.557 | 1.00 | 36.83 | | C |
| ATOM | 4448 | CD1 | TYR | 558 | 51.876 | 23.005 | −46.139 | 1.00 | 36.83 | | C |
| ATOM | 4449 | CE1 | TYR | 558 | 51.337 | 23.968 | −46.992 | 1.00 | 36.83 | | C |
| ATOM | 4450 | CD2 | TYR | 558 | 53.826 | 24.345 | −45.839 | 1.00 | 36.83 | | C |
| ATOM | 4451 | CE2 | TYR | 558 | 53.297 | 25.312 | −46.680 | 1.00 | 36.83 | | C |
| ATOM | 4452 | CZ | TYR | 558 | 52.052 | 25.118 | −47.265 | 1.00 | 36.83 | | C |
| ATOM | 4453 | OH | TYR | 558 | 51.553 | 26.040 | −48.167 | 1.00 | 36.83 | | O |
| ATOM | 4454 | C | TYR | 558 | 51.761 | 21.946 | −43.144 | 1.00 | 36.83 | | C |
| ATOM | 4455 | O | TYR | 558 | 51.264 | 20.833 | −43.005 | 1.00 | 36.83 | | O |
| ATOM | 4456 | N | GLU | 559 | 51.018 | 23.034 | −43.238 | 1.00 | 36.83 | | N |
| ATOM | 4457 | CA | GLU | 559 | 49.584 | 22.907 | −43.170 | 1.00 | 36.83 | | C |
| ATOM | 4458 | CB | GLU | 559 | 49.107 | 23.104 | −41.726 | 1.00 | 36.83 | | C |
| ATOM | 4459 | CG | GLU | 559 | 47.611 | 22.848 | −41.503 | 1.00 | 36.83 | | C |
| ATOM | 4460 | CD | GLU | 559 | 47.229 | 22.845 | −40.021 | 1.00 | 36.83 | | C |
| ATOM | 4461 | OE1 | GLU | 559 | 47.714 | 21.984 | −39.253 | 1.00 | 36.83 | | O |
| ATOM | 4462 | OE2 | GLU | 559 | 46.442 | 23.708 | −39.606 | 1.00 | 36.83 | | O |
| ATOM | 4463 | C | GLU | 559 | 48.863 | 23.873 | −44.083 | 1.00 | 36.83 | | C |
| ATOM | 4464 | O | GLU | 559 | 49.049 | 25.087 | −44.004 | 1.00 | 36.83 | | O |
| ATOM | 4465 | N | GLU | 560 | 48.069 | 23.321 | −44.986 | 1.00 | 36.83 | | N |
| ATOM | 4466 | CA | GLU | 560 | 47.252 | 24.147 | −45.847 | 1.00 | 36.83 | | C |
| ATOM | 4467 | CB | GLU | 560 | 46.931 | 23.468 | −47.160 | 1.00 | 36.83 | | C |
| ATOM | 4468 | CG | GLU | 560 | 46.010 | 24.320 | −48.013 | 1.00 | 36.83 | | C |
| ATOM | 4469 | CD | GLU | 560 | 45.669 | 23.673 | −49.336 | 1.00 | 36.83 | | C |
| ATOM | 4470 | OE1 | GLU | 560 | 46.528 | 22.961 | −49.888 | 1.00 | 36.83 | | O |
| ATOM | 4471 | OE2 | GLU | 560 | 44.550 | 23.894 | −49.831 | 1.00 | 36.83 | | O |
| ATOM | 4472 | C | GLU | 560 | 45.969 | 24.285 | −45.048 | 1.00 | 36.83 | | C |
| ATOM | 4473 | O | GLU | 560 | 45.256 | 23.311 | −44.837 | 1.00 | 36.83 | | O |
| ATOM | 4474 | N | PRO | 561 | 45.666 | 25.495 | −44.578 | 1.00 | 36.83 | | N |
| ATOM | 4475 | CD | PRO | 561 | 46.419 | 26.745 | −44.771 | 1.00 | 36.83 | | C |
| ATOM | 4476 | CA | PRO | 561 | 44.445 | 25.708 | −43.792 | 1.00 | 36.83 | | C |
| ATOM | 4477 | CB | PRO | 561 | 44.671 | 27.090 | −43.187 | 1.00 | 36.83 | | C |
| ATOM | 4478 | CG | PRO | 561 | 45.457 | 27.793 | −44.278 | 1.00 | 36.83 | | C |
| ATOM | 4479 | C | PRO | 561 | 43.153 | 25.638 | −44.606 | 1.00 | 36.83 | | C |
| ATOM | 4480 | O | PRO | 561 | 43.125 | 26.023 | −45.781 | 1.00 | 36.83 | | O |
| ATOM | 4481 | N | ARG | 562 | 42.092 | 25.148 | −43.968 | 1.00 | 36.83 | | N |
| ATOM | 4482 | CA | ARG | 562 | 40.780 | 25.036 | −44.593 | 1.00 | 36.83 | | C |
| ATOM | 4483 | CB | ARG | 562 | 39.970 | 23.903 | −43.939 | 1.00 | 36.83 | | C |
| ATOM | 4484 | CG | ARG | 562 | 40.422 | 22.486 | −44.292 | 1.00 | 36.83 | | C |
| ATOM | 4485 | CD | ARG | 562 | 39.464 | 21.471 | −43.708 | 1.00 | 36.83 | | C |
| ATOM | 4486 | NE | ARG | 562 | 39.593 | 21.399 | −42.263 | 1.00 | 36.83 | | N |
| ATOM | 4487 | CZ | ARG | 562 | 38.610 | 21.097 | −41.423 | 1.00 | 36.83 | | C |
| ATOM | 4488 | NH1 | ARG | 562 | 37.390 | 20.839 | −41.880 | 1.00 | 36.83 | | N |
| ATOM | 4489 | NH2 | ARG | 562 | 38.861 | 21.021 | −40.122 | 1.00 | 36.83 | | N |
| ATOM | 4490 | C | ARG | 562 | 39.991 | 26.340 | −44.458 | 1.00 | 36.83 | | C |
| ATOM | 4491 | O | ARG | 562 | 39.024 | 26.586 | −45.184 | 1.00 | 36.83 | | O |
| ATOM | 4492 | N | PHE | 563 | 40.421 | 27.175 | −43.524 | 1.00 | 36.83 | | N |
| ATOM | 4493 | CA | PHE | 563 | 39.748 | 28.429 | −43.246 | 1.00 | 36.83 | | C |
| ATOM | 4494 | CB | PHE | 563 | 39.751 | 28.650 | −41.734 | 1.00 | 36.83 | | C |
| ATOM | 4495 | CG | PHE | 563 | 41.130 | 28.756 | −41.149 | 1.00 | 36.83 | | C |
| ATOM | 4496 | CD1 | PHE | 563 | 41.865 | 29.932 | −41.278 | 1.00 | 36.83 | | C |
| ATOM | 4497 | CD2 | PHE | 563 | 41.715 | 27.660 | −40.520 | 1.00 | 36.83 | | C |
| ATOM | 4498 | CE1 | PHE | 563 | 43.161 | 30.013 | −40.795 | 1.00 | 36.83 | | C |
| ATOM | 4499 | CE2 | PHE | 563 | 43.009 | 27.732 | −40.034 | 1.00 | 36.83 | | C |
| ATOM | 4500 | CZ | PHE | 563 | 43.738 | 28.913 | −40.173 | 1.00 | 36.83 | | C |
| ATOM | 4501 | C | PHE | 563 | 40.321 | 29.658 | −43.956 | 1.00 | 36.83 | | C |
| ATOM | 4502 | O | PHE | 563 | 39.829 | 30.767 | −43.755 | 1.00 | 36.83 | | O |
| ATOM | 4503 | N | SER | 564 | 41.351 | 29.472 | −44.774 | 1.00 | 36.83 | | N |
| ATOM | 4504 | CA | SER | 564 | 41.954 | 30.584 | −45.495 | 1.00 | 36.83 | | C |
| ATOM | 4505 | CB | SER | 564 | 42.957 | 31.324 | −44.604 | 1.00 | 36.83 | | C |
| ATOM | 4506 | OG | SER | 564 | 43.601 | 32.350 | −45.338 | 1.00 | 36.83 | | O |
| ATOM | 4507 | C | SER | 564 | 42.663 | 30.131 | −46.765 | 1.00 | 36.83 | | C |
| ATOM | 4508 | O | SER | 564 | 43.188 | 29.030 | −46.826 | 1.00 | 36.83 | | O |
| ATOM | 4509 | N | LYS | 565 | 42.680 | 30.998 | −47.770 | 1.00 | 36.83 | | N |
| ATOM | 4510 | CA | LYS | 565 | 43.329 | 30.712 | −49.048 | 1.00 | 36.83 | | C |
| ATOM | 4511 | CB | LYS | 565 | 42.370 | 31.017 | −50.195 | 1.00 | 36.83 | | C |
| ATOM | 4512 | CG | LYS | 565 | 41.137 | 30.143 | −50.207 | 1.00 | 36.83 | | C |
| ATOM | 4513 | CD | LYS | 565 | 40.201 | 30.612 | −51.282 | 1.00 | 36.83 | | C |
| ATOM | 4514 | CE | LYS | 565 | 38.796 | 30.055 | −51.079 | 1.00 | 36.83 | | C |
| ATOM | 4515 | NZ | LYS | 565 | 37.853 | 30.683 | −52.053 | 1.00 | 36.83 | | N |
| ATOM | 4516 | C | LYS | 565 | 44.597 | 31.542 | −49.223 | 1.00 | 36.83 | | C |
| ATOM | 4517 | O | LYS | 565 | 45.284 | 31.441 | −50.230 | 1.00 | 36.83 | | O |
| ATOM | 4518 | N | THR | 566 | 44.896 | 32.363 | −48.225 | 1.00 | 36.83 | | N |
| ATOM | 4519 | CA | THR | 566 | 46.067 | 33.222 | −48.262 | 1.00 | 36.83 | | C |
| ATOM | 4520 | CB | THR | 566 | 45.658 | 34.733 | −48.207 | 1.00 | 36.83 | | C |
| ATOM | 4521 | OG1 | THR | 566 | 45.026 | 35.032 | −46.960 | 1.00 | 36.83 | | O |
| ATOM | 4522 | CG2 | THR | 566 | 44.680 | 35.060 | −49.322 | 1.00 | 36.83 | | C |
| ATOM | 4523 | C | THR | 566 | 47.060 | 32.934 | −47.137 | 1.00 | 36.83 | | C |
| ATOM | 4524 | O | THR | 566 | 48.022 | 33.674 | −46.974 | 1.00 | 36.83 | | O |
| ATOM | 4525 | N | GLU | 567 | 46.820 | 31.873 | −46.362 | 1.00 | 36.83 | | N |
| ATOM | 4526 | CA | GLU | 567 | 47.717 | 31.505 | −45.264 | 1.00 | 36.83 | | C |
| ATOM | 4527 | CB | GLU | 567 | 47.036 | 31.693 | −43.896 | 1.00 | 36.83 | | C |
| ATOM | 4528 | CG | GLU | 567 | 46.374 | 33.044 | −43.647 | 1.00 | 36.83 | | C |
| ATOM | 4529 | CD | GLU | 567 | 45.910 | 33.201 | −42.213 | 1.00 | 36.83 | | C |
| ATOM | 4530 | OE1 | GLU | 567 | 46.624 | 33.832 | −41.411 | 1.00 | 36.83 | | O |
| ATOM | 4531 | OE2 | GLU | 567 | 44.838 | 32.674 | −41.865 | 1.00 | 36.83 | | O |
| ATOM | 4532 | C | GLU | 567 | 48.221 | 30.060 | −45.328 | 1.00 | 36.83 | | C |
| ATOM | 4533 | O | GLU | 567 | 47.623 | 29.199 | −45.973 | 1.00 | 36.83 | | O |
| ATOM | 4534 | N | PHE | 568 | 49.345 | 29.815 | −44.666 | 1.00 | 36.83 | | N |
| ATOM | 4535 | CA | PHE | 568 | 49.908 | 28.474 | −44.559 | 1.00 | 36.83 | | C |
| ATOM | 4536 | CB | PHE | 568 | 50.971 | 28.180 | −45.634 | 1.00 | 36.83 | | C |
| ATOM | 4537 | CG | PHE | 568 | 52.230 | 28.978 | −45.501 | 1.00 | 36.83 | | C |
| ATOM | 4538 | CD1 | PHE | 568 | 52.367 | 30.201 | −46.159 | 1.00 | 36.83 | | C |
| ATOM | 4539 | CD2 | PHE | 568 | 53.288 | 28.506 | −44.731 | 1.00 | 36.83 | | C |
| ATOM | 4540 | CE1 | PHE | 568 | 53.543 | 30.941 | −46.059 | 1.00 | 36.83 | | C |
| ATOM | 4541 | CE2 | PHE | 568 | 54.467 | 29.234 | −44.620 | 1.00 | 36.83 | | C |
| ATOM | 4542 | CZ | PHE | 568 | 54.597 | 30.461 | −45.290 | 1.00 | 36.83 | | C |
| ATOM | 4543 | C | PHE | 568 | 50.524 | 28.408 | −43.180 | 1.00 | 36.83 | | C |
| ATOM | 4544 | O | PHE | 568 | 50.939 | 29.428 | −42.648 | 1.00 | 36.83 | | O |
| ATOM | 4545 | N | GLY | 569 | 50.555 | 27.223 | −42.588 | 1.00 | 36.83 | | N |
| ATOM | 4546 | CA | GLY | 569 | 51.131 | 27.088 | −41.265 | 1.00 | 36.83 | | C |
| ATOM | 4547 | C | GLY | 569 | 52.408 | 26.255 | −41.216 | 1.00 | 36.83 | | C |
| ATOM | 4548 | O | GLY | 569 | 52.613 | 25.354 | −42.036 | 1.00 | 36.83 | | O |
| ATOM | 4549 | N | VAL | 570 | 53.280 | 26.568 | −40.265 | 1.00 | 36.83 | | N |
| ATOM | 4550 | CA | VAL | 570 | 54.513 | 25.816 | −40.088 | 1.00 | 36.83 | | C |
| ATOM | 4551 | CB | VAL | 570 | 55.772 | 26.635 | −40.472 | 1.00 | 36.83 | | C |
| ATOM | 4552 | CG1 | VAL | 570 | 57.028 | 25.850 | −40.105 | 1.00 | 36.83 | | C |
| ATOM | 4553 | CG2 | VAL | 570 | 55.759 | 26.966 | −41.972 | 1.00 | 36.83 | | C |
| ATOM | 4554 | C | VAL | 570 | 54.600 | 25.438 | −38.614 | 1.00 | 36.83 | | C |
| ATOM | 4555 | O | VAL | 570 | 54.416 | 26.276 | −37.746 | 1.00 | 36.83 | | O |
| ATOM | 4556 | N | THR | 571 | 54.842 | 24.165 | −38.339 | 1.00 | 36.83 | | N |
| ATOM | 4557 | CA | THR | 571 | 54.953 | 23.709 | −36.965 | 1.00 | 36.83 | | C |
| ATOM | 4558 | CB | THR | 571 | 54.544 | 22.218 | −36.842 | 1.00 | 36.83 | | C |
| ATOM | 4559 | OG1 | THR | 571 | 53.173 | 22.069 | −37.223 | 1.00 | 36.83 | | O |
| ATOM | 4560 | CG2 | THR | 571 | 54.719 | 21.730 | −35.416 | 1.00 | 36.83 | | C |
| ATOM | 4561 | C | THR | 571 | 56.409 | 23.884 | −36.517 | 1.00 | 36.83 | | C |
| ATOM | 4562 | O | THR | 571 | 57.273 | 23.099 | −36.910 | 1.00 | 36.83 | | O |
| ATOM | 4563 | N | HIS | 572 | 56.664 | 24.925 | −35.722 | 1.00 | 36.83 | | N |
| ATOM | 4564 | CA | HIS | 572 | 58.004 | 25.237 | −35.213 | 1.00 | 36.83 | | C |
| ATOM | 4565 | CB | HIS | 572 | 58.162 | 26.751 | −35.002 | 1.00 | 36.83 | | C |
| ATOM | 4566 | CG | HIS | 572 | 58.192 | 27.549 | −36.271 | 1.00 | 36.83 | | C |
| ATOM | 4567 | CD2 | HIS | 572 | 57.238 | 28.299 | −36.877 | 1.00 | 36.83 | | C |
| ATOM | 4568 | ND1 | HIS | 572 | 59.313 | 27.646 | −37.066 | 1.00 | 36.83 | | N |
| ATOM | 4569 | CE1 | HIS | 572 | 59.051 | 28.424 | −38.100 | 1.00 | 36.83 | | C |
| ATOM | 4570 | NE2 | HIS | 572 | 57.799 | 28.834 | −38.009 | 1.00 | 36.83 | | N |
| ATOM | 4571 | C | HIS | 572 | 58.204 | 24.528 | −33.881 | 1.00 | 36.83 | | C |
| ATOM | 4572 | O | HIS | 572 | 57.250 | 24.028 | −33.291 | 1.00 | 36.83 | | O |
| ATOM | 4573 | N | TYR | 573 | 59.444 | 24.479 | −33.414 | 1.00 | 36.83 | | N |
| ATOM | 4574 | CA | TYR | 573 | 59.746 | 23.852 | −32.135 | 1.00 | 36.83 | | C |
| ATOM | 4575 | CB | TYR | 573 | 61.226 | 23.990 | −31.796 | 1.00 | 36.83 | | C |
| ATOM | 4576 | CG | TYR | 573 | 61.646 | 25.402 | −31.431 | 1.00 | 36.83 | | C |
| ATOM | 4577 | CD1 | TYR | 573 | 61.758 | 26.385 | −32.405 | 1.00 | 36.83 | | C |
| ATOM | 4578 | CE1 | TYR | 573 | 62.147 | 27.676 | −32.088 | 1.00 | 36.83 | | C |
| ATOM | 4579 | CD2 | TYR | 573 | 61.938 | 25.747 | −30.108 | 1.00 | 36.83 | | C |
| ATOM | 4580 | CE2 | TYR | 573 | 62.337 | 27.050 | −29.776 | 1.00 | 36.83 | | C |
| ATOM | 4581 | CZ | TYR | 573 | 62.438 | 28.010 | −30.778 | 1.00 | 36.83 | | C |
| ATOM | 4582 | OH | TYR | 573 | 62.823 | 29.300 | −30.484 | 1.00 | 36.83 | | O |
| ATOM | 4583 | C | TYR | 573 | 58.932 | 24.517 | −31.025 | 1.00 | 36.83 | | C |
| ATOM | 4584 | O | TYR | 573 | 58.552 | 23.867 | −30.060 | 1.00 | 36.83 | | O |
| ATOM | 4585 | N | ALA | 574 | 58.670 | 25.813 | −31.169 | 1.00 | 36.83 | | N |
| ATOM | 4586 | CA | ALA | 574 | 57.920 | 26.533 | −30.160 | 1.00 | 36.83 | | C |
| ATOM | 4587 | CB | ALA | 574 | 58.532 | 27.921 | −29.942 | 1.00 | 36.83 | | C |
| ATOM | 4588 | C | ALA | 574 | 56.427 | 26.647 | −30.493 | 1.00 | 36.83 | | C |
| ATOM | 4589 | O | ALA | 574 | 55.699 | 27.371 | −29.828 | 1.00 | 36.83 | | O |
| ATOM | 4590 | N | GLY | 575 | 55.985 | 25.925 | −31.521 | 1.00 | 36.83 | | N |
| ATOM | 4591 | CA | GLY | 575 | 54.588 | 25.950 | −31.900 | 1.00 | 36.83 | | C |
| ATOM | 4592 | C | GLY | 575 | 54.306 | 26.263 | −33.359 | 1.00 | 36.83 | | C |
| ATOM | 4593 | O | GLY | 575 | 55.174 | 26.708 | −34.108 | 1.00 | 36.83 | | O |
| ATOM | 4594 | N | GLN | 576 | 53.062 | 26.030 | −33.754 | 1.00 | 36.83 | | N |
| ATOM | 4595 | CA | GLN | 576 | 52.630 | 26.272 | −35.113 | 1.00 | 36.83 | | C |
| ATOM | 4596 | CB | GLN | 576 | 51.381 | 25.441 | −35.438 | 1.00 | 36.83 | | C |
| ATOM | 4597 | CG | GLN | 576 | 50.944 | 25.547 | −36.898 | 1.00 | 36.83 | | C |
| ATOM | 4598 | CD | GLN | 576 | 49.638 | 24.844 | −37.158 | 1.00 | 36.83 | | C |
| ATOM | 4599 | OE1 | GLN | 576 | 48.663 | 25.033 | −36.431 | 1.00 | 36.83 | | O |
| ATOM | 4600 | NE2 | GLN | 576 | 49.604 | 24.035 | −38.200 | 1.00 | 36.83 | | N |
| ATOM | 4601 | C | GLN | 576 | 52.323 | 27.742 | −35.304 | 1.00 | 36.83 | | C |
| ATOM | 4602 | O | GLN | 576 | 51.732 | 28.384 | −34.441 | 1.00 | 36.83 | | O |
| ATOM | 4603 | N | VAL | 577 | 52.737 | 28.260 | −36.447 | 1.00 | 36.83 | | N |
| ATOM | 4604 | CA | VAL | 577 | 52.518 | 29.644 | −36.789 | 1.00 | 36.83 | | C |
| ATOM | 4605 | CB | VAL | 577 | 53.844 | 30.439 | −36.817 | 1.00 | 36.83 | | C |
| ATOM | 4606 | CG1 | VAL | 577 | 53.573 | 31.890 | −37.202 | 1.00 | 36.83 | | C |
| ATOM | 4607 | CG2 | VAL | 577 | 54.512 | 30.377 | −35.454 | 1.00 | 36.83 | | C |
| ATOM | 4608 | C | VAL | 577 | 51.847 | 29.713 | −38.152 | 1.00 | 36.83 | | C |
| ATOM | 4609 | O | VAL | 577 | 52.285 | 29.087 | −39.124 | 1.00 | 36.83 | | O |
| ATOM | 4610 | N | MET | 578 | 50.764 | 30.465 | −38.199 | 1.00 | 36.83 | | N |
| ATOM | 4611 | CA | MET | 578 | 50.012 | 30.637 | −39.415 | 1.00 | 36.83 | | C |
| ATOM | 4612 | CB | MET | 578 | 48.506 | 30.720 | −39.071 | 1.00 | 36.83 | | C |
| ATOM | 4613 | CG | MET | 578 | 47.540 | 30.172 | −40.123 | 1.00 | 36.83 | | C |
| ATOM | 4614 | SD | MET | 578 | 47.910 | 28.522 | −40.840 | 1.00 | 36.83 | | S |
| ATOM | 4615 | CE | MET | 578 | 47.227 | 27.425 | −39.701 | 1.00 | 36.83 | | C |
| ATOM | 4616 | C | MET | 578 | 50.559 | 31.940 | −40.008 | 1.00 | 36.83 | | C |
| ATOM | 4617 | O | MET | 578 | 50.657 | 32.958 | −39.319 | 1.00 | 36.83 | | O |
| ATOM | 4618 | N | TYR | 579 | 50.945 | 31.885 | −41.278 | 1.00 | 36.83 | | N |
| ATOM | 4619 | CA | TYR | 579 | 51.508 | 33.033 | −41.984 | 1.00 | 36.83 | | C |
| ATOM | 4620 | CB | TYR | 579 | 52.891 | 32.659 | −42.559 | 1.00 | 36.83 | | C |
| ATOM | 4621 | CG | TYR | 579 | 53.950 | 32.353 | −41.528 | 1.00 | 36.83 | | C |
| ATOM | 4622 | CD1 | TYR | 579 | 54.642 | 33.376 | −40.877 | 1.00 | 36.83 | | C |
| ATOM | 4623 | CE1 | TYR | 579 | 55.604 | 33.090 | −39.894 | 1.00 | 36.83 | | C |
| ATOM | 4624 | CD2 | TYR | 579 | 54.244 | 31.039 | −41.180 | 1.00 | 36.83 | | C |
| ATOM | 4625 | CE2 | TYR | 579 | 55.194 | 30.743 | −40.209 | 1.00 | 36.83 | | C |
| ATOM | 4626 | CZ | TYR | 579 | 55.866 | 31.769 | −39.569 | 1.00 | 36.83 | | C |
| ATOM | 4627 | OH | TYR | 579 | 56.764 | 31.457 | −38.590 | 1.00 | 36.83 | | O |
| ATOM | 4628 | C | TYR | 579 | 50.620 | 33.562 | −43.125 | 1.00 | 36.83 | | C |
| ATOM | 4629 | O | TYR | 579 | 50.018 | 32.790 | −43.863 | 1.00 | 36.83 | | O |
| ATOM | 4630 | N | GLU | 580 | 50.559 | 34.887 | −43.258 | 1.00 | 36.83 | | N |
| ATOM | 4631 | CA | GLU | 580 | 49.801 | 35.549 | −44.317 | 1.00 | 36.83 | | C |
| ATOM | 4632 | CB | GLU | 580 | 49.223 | 36.870 | −43.804 | 1.00 | 36.83 | | C |
| ATOM | 4633 | CG | GLU | 580 | 48.549 | 37.737 | −44.862 | 1.00 | 36.83 | | C |
| ATOM | 4634 | CD | GLU | 580 | 47.559 | 36.976 | −45.720 | 1.00 | 26.83 | | C |
| ATOM | 4635 | OE1 | GLU | 580 | 46.684 | 36.274 | −45.167 | 1.00 | 36.83 | | O |
| ATOM | 4636 | OE2 | GLU | 580 | 47.653 | 37.086 | −46.959 | 1.00 | 36.83 | | O |
| ATOM | 4637 | C | GLU | 580 | 50.782 | 35.791 | −45.465 | 1.00 | 36.83 | | C |
| ATOM | 4638 | O | GLU | 580 | 51.864 | 36.333 | −45.254 | 1.00 | 36.83 | | O |
| ATOM | 4639 | N | ILE | 581 | 50.402 | 35.397 | −46.679 | 1.00 | 36.83 | | N |
| ATOM | 4640 | CA | ILE | 581 | 51.287 | 35.520 | −47.842 | 1.00 | 36.83 | | C |
| ATOM | 4641 | CB | ILE | 581 | 50.952 | 34.418 | −48.893 | 1.00 | 36.83 | | C |
| ATOM | 4642 | CG2 | ILE | 581 | 49.843 | 34.900 | −49.857 | 1.00 | 36.83 | | C |
| ATOM | 4643 | CG1 | ILE | 581 | 52.198 | 34.069 | −49.712 | 1.00 | 36.83 | | C |
| ATOM | 4644 | CD1 | ILE | 581 | 53.265 | 33.316 | −48.946 | 1.00 | 36.83 | | C |
| ATOM | 4645 | C | ILE | 581 | 51.273 | 36.882 | −48.548 | 1.00 | 36.83 | | C |
| ATOM | 4646 | O | ILE | 581 | 52.134 | 37.163 | −49.383 | 1.00 | 36.83 | | O |
| ATOM | 4647 | N | GLN | 582 | 50.301 | 37.721 | −48.207 | 1.00 | 36.83 | | N |
| ATOM | 4648 | CA | GLN | 582 | 50.161 | 39.024 | −48.846 | 1.00 | 36.83 | | C |
| ATOM | 4649 | CB | GLN | 582 | 49.030 | 39.810 | −48.178 | 1.00 | 36.83 | | C |
| ATOM | 4650 | CG | GLN | 582 | 48.703 | 41.132 | −48.844 | 1.00 | 36.83 | | C |
| ATOM | 4651 | CD | GLN | 582 | 47.963 | 42.079 | −47.909 | 1.00 | 36.83 | | C |
| ATOM | 4652 | OE1 | GLN | 582 | 46.813 | 41.829 | −47.531 | 1.00 | 36.83 | | O |
| ATOM | 4653 | NE2 | GLN | 582 | 48.629 | 43.171 | −47.519 | 1.00 | 36.83 | | N |
| ATOM | 4654 | C | GLN | 582 | 51.443 | 39.852 | −48.846 | 1.00 | 36.83 | | C |
| ATOM | 4655 | O | GLN | 582 | 52.053 | 40.056 | −47.806 | 1.00 | 36.83 | | O |
| ATOM | 4656 | N | ASP | 583 | 51.845 | 40.303 | −50.036 | 1.00 | 36.83 | | N |
| ATOM | 4657 | CA | ASP | 583 | 53.026 | 41.136 | −50.228 | 1.00 | 36.83 | | C |
| ATOM | 4658 | CB | ASP | 583 | 53.012 | 42.278 | −49.210 | 1.00 | 36.83 | | C |
| ATOM | 4659 | CG | ASP | 583 | 52.069 | 43.394 | −49.608 | 1.00 | 36.83 | | C |
| ATOM | 4660 | OD1 | ASP | 583 | 51.519 | 44.060 | −48.708 | 1.00 | 36.83 | | O |
| ATOM | 4661 | OD2 | ASP | 583 | 51.889 | 43.616 | −50.829 | 1.00 | 36.83 | | O |
| ATOM | 4662 | C | ASP | 583 | 54.388 | 40.462 | −50.200 | 1.00 | 36.83 | | C |
| ATOM | 4663 | O | ASP | 583 | 55.403 | 41.134 | −50.357 | 1.00 | 36.83 | | O |
| ATOM | 4664 | N | TRP | 584 | 54.429 | 39.152 | −50.006 | 1.00 | 36.83 | | N |
| ATOM | 4665 | CA | TRP | 584 | 55.707 | 38.450 | −49.942 | 1.00 | 36.83 | | C |
| ATOM | 4666 | CB | TRP | 584 | 55.478 | 36.956 | −49.669 | 1.00 | 36.83 | | C |
| ATOM | 4667 | CG | TRP | 584 | 55.232 | 36.694 | −48.216 | 1.00 | 36.83 | | C |
| ATOM | 4668 | CD2 | TRP | 584 | 55.654 | 35.558 | −47.462 | 1.00 | 36.83 | | C |
| ATOM | 4669 | CE2 | TRP | 584 | 55.207 | 35.748 | −46.141 | 1.00 | 36.83 | | C |
| ATOM | 4670 | CE3 | TRP | 584 | 56.367 | 34.397 | −47.774 | 1.00 | 36.83 | | C |
| ATOM | 4671 | CD1 | TRP | 584 | 54.565 | 37.503 | −47.344 | 1.00 | 36.83 | | C |
| ATOM | 4672 | NE1 | TRP | 584 | 54.548 | 36.946 | −46.102 | 1.00 | 36.83 | | N |
| ATOM | 4673 | CZ2 | TRP | 584 | 55.451 | 34.822 | −45.127 | 1.00 | 36.83 | | C |
| ATOM | 4674 | CZ3 | TRP | 584 | 56.612 | 33.471 | −46.765 | 1.00 | 36.83 | | C |
| ATOM | 4675 | CH2 | TRP | 584 | 56.154 | 33.690 | −45.457 | 1.00 | 36.83 | | C |
| ATOM | 4676 | C | TRP | 584 | 56.592 | 38.642 | −51.175 | 1.00 | 36.83 | | C |
| ATOM | 4677 | O | TRP | 584 | 57.809 | 38.785 | −51.056 | 1.00 | 36.83 | | O |
| ATOM | 4678 | N | LEU | 585 | 55.988 | 38.653 | −52.353 | 1.00 | 36.83 | | N |
| ATOM | 4679 | CA | LEU | 585 | 56.771 | 38.840 | −53.558 | 1.00 | 36.83 | | C |
| ATOM | 4680 | CB | LEU | 585 | 55.878 | 38.751 | −54.798 | 1.00 | 36.83 | | C |
| ATOM | 4681 | CG | LEU | 585 | 55.252 | 37.368 | −55.036 | 1.00 | 36.83 | | C |
| ATOM | 4682 | CD1 | LEU | 585 | 54.484 | 37.386 | −56.347 | 1.00 | 36.83 | | C |
| ATOM | 4683 | CD2 | LEU | 585 | 56.337 | 36.300 | −55.063 | 1.00 | 36.83 | | C |
| ATOM | 4684 | C | LEU | 585 | 57.498 | 40.178 | −53.508 | 1.00 | 36.83 | | C |
| ATOM | 4685 | O | LEU | 585 | 58.699 | 40.239 | −53.728 | 1.00 | 36.83 | | O |
| ATOM | 4686 | N | GLU | 586 | 56.777 | 41.243 | −53.191 | 1.00 | 36.83 | | N |
| ATOM | 4687 | CA | GLU | 586 | 57.396 | 42.564 | −53.120 | 1.00 | 36.83 | | C |
| ATOM | 4688 | CB | GLU | 586 | 56.320 | 43.657 | −53.080 | 1.00 | 36.83 | | C |
| ATOM | 4689 | CG | GLU | 586 | 55.432 | 43.684 | −54.313 | 1.00 | 36.83 | | C |
| ATOM | 4690 | CD | GLU | 586 | 56.169 | 44.076 | −55.588 | 1.00 | 36.83 | | C |
| ATOM | 4691 | OE1 | GLU | 586 | 56.732 | 45.198 | −55.622 | 1.00 | 36.83 | | O |
| ATOM | 4692 | OE2 | GLU | 586 | 56.174 | 43.271 | −56.550 | 1.00 | 36.83 | | O |
| ATOM | 4693 | C | GLU | 586 | 58.350 | 42.736 | −51.933 | 1.00 | 36.83 | | C |
| ATOM | 4694 | O | GLU | 586 | 59.317 | 43.491 | −52.015 | 1.00 | 36.83 | | O |
| ATOM | 4695 | N | LYS | 587 | 58.085 | 42.058 | −50.826 | 1.00 | 36.83 | | N |
| ATOM | 4696 | CA | LYS | 587 | 58.976 | 42.174 | −49.686 | 1.00 | 36.83 | | C |
| ATOM | 4697 | CB | LYS | 587 | 58.334 | 41.588 | −48.427 | 1.00 | 36.83 | | C |
| ATOM | 4698 | CG | LYS | 587 | 57.260 | 42.484 | −47.813 | 1.00 | 36.83 | | C |
| ATOM | 4699 | CD | LYS | 587 | 56.727 | 41.948 | −46.488 | 1.00 | 36.83 | | C |
| ATOM | 4700 | CE | LYS | 587 | 55.866 | 42.998 | −45.813 | 1.00 | 36.83 | | C |
| ATOM | 4701 | NZ | LYS | 587 | 55.285 | 42.573 | −44.510 | 1.00 | 36.83 | | N |
| ATOM | 4702 | C | LYS | 587 | 60.270 | 41.435 | −50.011 | 1.00 | 36.83 | | C |
| ATOM | 4703 | O | LYS | 587 | 61.349 | 41.881 | −49.646 | 1.00 | 36.83 | | O |
| ATOM | 4704 | N | ASN | 588 | 60.163 | 40.312 | −50.715 | 1.00 | 36.83 | | N |
| ATOM | 4705 | CA | ASN | 588 | 61.356 | 39.553 | −51.057 | 1.00 | 36.83 | | C |
| ATOM | 4706 | CB | ASN | 588 | 60.994 | 38.105 | −51.411 | 1.00 | 36.83 | | C |
| ATOM | 4707 | CG | ASN | 588 | 62.224 | 37.206 | −51.509 | 1.00 | 36.83 | | C |
| ATOM | 4708 | OD1 | ASN | 588 | 62.994 | 37.096 | −50.560 | 1.00 | 36.83 | | O |
| ATOM | 4709 | ND2 | ASN | 588 | 62.413 | 36.572 | −52.663 | 1.00 | 36.83 | | N |
| ATOM | 4710 | C | ASN | 588 | 62.168 | 40.198 | −52.201 | 1.00 | 36.83 | | C |
| ATOM | 4711 | O | ASN | 588 | 63.371 | 39.994 | −52.286 | 1.00 | 36.83 | | O |
| ATOM | 4712 | N | LYS | 589 | 61.515 | 40.969 | −53.069 | 1.00 | 36.83 | | N |
| ATOM | 4713 | CA | LYS | 589 | 62.218 | 41.633 | −54.170 | 1.00 | 36.83 | | C |
| ATOM | 4714 | CB | LYS | 589 | 61.274 | 41.859 | −55.356 | 1.00 | 36.83 | | C |
| ATOM | 4715 | CG | LYS | 589 | 60.657 | 40.582 | −55.945 | 1.00 | 36.83 | | C |
| ATOM | 4716 | CD | LYS | 589 | 59.823 | 40.876 | −57.201 | 1.00 | 36.83 | | C |
| ATOM | 4717 | CE | LYS | 589 | 58.778 | 41.986 | −56.956 | 1.00 | 36.83 | | C |
| ATOM | 4718 | NZ | LYS | 589 | 57.927 | 42.318 | −58.163 | 1.00 | 36.83 | | N |
| ATOM | 4719 | C | LYS | 589 | 62.793 | 42.984 | −53.695 | 1.00 | 36.83 | | C |
| ATOM | 4720 | O | LYS | 589 | 63.749 | 43.493 | −54.259 | 1.00 | 36.83 | | O |
| ATOM | 4721 | N | ASP | 590 | 62.187 | 43.560 | −52.661 | 1.00 | 36.83 | | N |
| ATOM | 4722 | CA | ASP | 590 | 62.652 | 44.821 | −52.096 | 1.00 | 36.83 | | C |
| ATOM | 4723 | CB | ASP | 590 | 63.890 | 44.559 | −51.227 | 1.00 | 36.83 | | C |
| ATOM | 4724 | CG | ASP | 590 | 64.189 | 45.691 | −50.257 | 1.00 | 36.83 | | C |
| ATOM | 4725 | OD1 | ASP | 590 | 65.347 | 45.792 | −49.807 | 1.00 | 36.83 | | O |
| ATOM | 4726 | OD2 | ASP | 590 | 63.272 | 46.468 | −49.926 | 1.00 | 36.83 | | O |
| ATOM | 4727 | C | ASP | 590 | 62.995 | 45.858 | −53.172 | 1.00 | 36.83 | | C |
| ATOM | 4728 | O | ASP | 590 | 64.109 | 46.351 | −53.217 | 1.00 | 36.83 | | O |
| ATOM | 4729 | N | PRO | 591 | 62.037 | 46.196 | −54.052 | 1.00 | 36.83 | | N |
| ATOM | 4730 | CD | PRO | 591 | 60.724 | 45.560 | −54.256 | 1.00 | 36.83 | | C |
| ATOM | 4731 | CA | PRO | 591 | 62.304 | 47.183 | −55.106 | 1.00 | 36.83 | | C |
| ATOM | 4732 | CB | PRO | 591 | 61.220 | 46.887 | −56.128 | 1.00 | 36.83 | | C |
| ATOM | 4733 | CG | PRO | 591 | 60.069 | 46.478 | −55.256 | 1.00 | 36.83 | | C |
| ATOM | 4734 | C | PRO | 591 | 62.294 | 48.655 | −54.677 | 1.00 | 36.83 | | C |
| ATOM | 4735 | O | PRO | 591 | 61.805 | 49.014 | −53.612 | 1.00 | 36.83 | | O |
| ATOM | 4736 | N | LEU | 592 | 62.856 | 49.488 | −55.541 | 1.00 | 36.83 | | N |
| ATOM | 4737 | CA | LEU | 592 | 62.939 | 50.933 | −55.357 | 1.00 | 36.83 | | C |
| ATOM | 4738 | CB | LEU | 592 | 64.094 | 51.293 | −54.417 | 1.00 | 36.83 | | C |
| ATOM | 4739 | CG | LEU | 592 | 64.320 | 52.778 | −54.090 | 1.00 | 36.83 | | C |
| ATOM | 4740 | CD1 | LEU | 592 | 63.094 | 53.343 | −53.373 | 1.00 | 36.83 | | C |
| ATOM | 4741 | CD2 | LEU | 592 | 65.567 | 52.934 | −53.211 | 1.00 | 36.83 | | C |
| ATOM | 4742 | C | LEU | 592 | 63.188 | 51.552 | −56.740 | 1.00 | 36.83 | | C |
| ATOM | 4743 | O | LEU | 592 | 64.079 | 51.118 | −57.471 | 1.00 | 36.83 | | O |
| ATOM | 4744 | N | GLN | 593 | 62.388 | 52.548 | −57.108 | 1.00 | 36.83 | | N |
| ATOM | 4745 | CA | GLN | 593 | 62.566 | 53.203 | −58.401 | 1.00 | 36.83 | | C |
| ATOM | 4746 | CB | GLN | 593 | 61.519 | 54.299 | −58.596 | 1.00 | 36.83 | | C |
| ATOM | 4747 | CG | GLN | 593 | 60.143 | 53.774 | −58.931 | 1.00 | 36.83 | | C |
| ATOM | 4748 | CD | GLN | 593 | 60.159 | 52.835 | −60.115 | 1.00 | 36.83 | | C |
| ATOM | 4749 | OE1 | GLN | 593 | 61.030 | 52.922 | −60.983 | 1.00 | 36.83 | | O |
| ATOM | 4750 | NE2 | GLN | 593 | 59.187 | 51.942 | −60.167 | 1.00 | 36.83 | | N |
| ATOM | 4751 | C | GLN | 593 | 63.964 | 53.811 | −58.523 | 1.00 | 36.83 | | C |
| ATOM | 4752 | O | GLN | 593 | 64.413 | 54.517 | −57.623 | 1.00 | 36.83 | | O |
| ATOM | 4753 | N | GLN | 594 | 64.649 | 53.534 | −59.634 | 1.00 | 36.83 | | N |
| ATOM | 4754 | CA | GLN | 594 | 65.987 | 54.080 | −59.836 | 1.00 | 36.83 | | C |
| ATOM | 4755 | CB | GLN | 594 | 66.610 | 53.595 | −61.159 | 1.00 | 36.83 | | C |
| ATOM | 4756 | CG | GLN | 594 | 67.042 | 52.130 | −61.119 | 1.00 | 36.83 | | C |
| ATOM | 4757 | CD | GLN | 594 | 67.889 | 51.703 | −62.312 | 1.00 | 36.83 | | C |
| ATOM | 4758 | OE1 | GLN | 594 | 69.090 | 52.001 | −62.386 | 1.00 | 36.83 | | O |
| ATOM | 4759 | NE2 | GLN | 594 | 67.265 | 51.000 | −63.258 | 1.00 | 36.83 | | N |
| ATOM | 4760 | C | GLN | 594 | 65.913 | 55.594 | −59.806 | 1.00 | 36.83 | | C |
| ATOM | 4761 | O | GLN | 594 | 66.823 | 56.240 | −59.318 | 1.00 | 36.83 | | O |
| ATOM | 4762 | N | ASP | 595 | 64.822 | 56.162 | −60.311 | 1.00 | 36.83 | | N |
| ATOM | 4763 | CA | ASP | 595 | 64.665 | 57.615 | −60.288 | 1.00 | 36.83 | | C |
| ATOM | 4764 | CB | ASP | 595 | 63.371 | 58.025 | −60.992 | 1.00 | 36.83 | | C |
| ATOM | 4765 | CG | ASP | 595 | 63.587 | 58.353 | −62.460 | 1.00 | 36.83 | | C |
| ATOM | 4766 | OD1 | ASP | 595 | 64.677 | 58.044 | −62.995 | 1.00 | 36.83 | | O |
| ATOM | 4767 | OD2 | ASP | 595 | 62.663 | 58.919 | −63.075 | 1.00 | 36.83 | | O |
| ATOM | 4768 | C | ASP | 595 | 64.684 | 58.148 | −58.853 | 1.00 | 36.83 | | C |
| ATOM | 4769 | O | ASP | 595 | 65.103 | 59.278 | −58.601 | 1.00 | 36.83 | | O |
| ATOM | 4770 | N | LEU | 596 | 64.240 | 57.336 | −57.900 | 1.00 | 36.83 | | N |
| ATOM | 4771 | CA | LEU | 596 | 64.265 | 57.790 | −56.515 | 1.00 | 36.83 | | C |
| ATOM | 4772 | CB | LEU | 596 | 63.396 | 56.893 | −55.635 | 1.00 | 36.83 | | C |
| ATOM | 4773 | CG | LEU | 596 | 61.915 | 57.161 | −55.906 | 1.00 | 36.83 | | C |
| ATOM | 4774 | CD1 | LEU | 596 | 61.046 | 56.057 | −55.320 | 1.00 | 36.83 | | C |
| ATOM | 4775 | CD2 | LEU | 596 | 61.553 | 58.524 | −55.330 | 1.00 | 36.83 | | C |
| ATOM | 4776 | C | LEU | 596 | 65.713 | 57.812 | −56.048 | 1.00 | 36.83 | | C |
| ATOM | 4777 | O | LEU | 596 | 66.145 | 58.763 | −55.400 | 1.00 | 36.83 | | O |
| ATOM | 4778 | N | GLU | 597 | 66.468 | 56.779 | −56.416 | 1.00 | 36.83 | | N |
| ATOM | 4779 | CA | GLU | 597 | 67.882 | 56.705 | −56.053 | 1.00 | 36.83 | | C |
| ATOM | 4780 | CB | GLU | 597 | 68.465 | 55.338 | −56.437 | 1.00 | 36.83 | | C |
| ATOM | 4781 | CG | GLU | 597 | 68.262 | 54.241 | −55.375 | 1.00 | 36.83 | | C |
| ATOM | 4782 | CD | GLU | 597 | 68.763 | 52.868 | −55.822 | 1.00 | 36.83 | | C |
| ATOM | 4783 | OE1 | GLU | 597 | 68.110 | 52.263 | −56.701 | 1.00 | 36.83 | | O |
| ATOM | 4784 | OE2 | GLU | 597 | 69.810 | 52.391 | −55.301 | 1.00 | 36.83 | | O |
| ATOM | 4785 | C | GLU | 597 | 68.678 | 57.842 | −56.722 | 1.00 | 36.83 | | C |
| ATOM | 4786 | O | GLU | 597 | 69.614 | 58.378 | −56.126 | 1.00 | 36.83 | | O |
| ATOM | 4787 | N | LEU | 598 | 68.303 | 58.211 | −57.950 | 1.00 | 36.83 | | N |
| ATOM | 4788 | CA | LEU | 598 | 68.976 | 59.292 | −58.666 | 1.00 | 36.83 | | C |
| ATOM | 4789 | CB | LEU | 598 | 68.456 | 59.410 | −60.096 | 1.00 | 36.83 | | C |
| ATOM | 4790 | CG | LEU | 598 | 68.895 | 58.335 | −61.077 | 1.00 | 36.83 | | C |
| ATOM | 4791 | CD1 | LEU | 598 | 68.059 | 58.441 | −62.340 | 1.00 | 36.83 | | C |
| ATOM | 4792 | CD2 | LEU | 598 | 70.397 | 58.489 | −61.365 | 1.00 | 36.83 | | C |
| ATOM | 4793 | C | LEU | 598 | 68.731 | 60.615 | −57.956 | 1.00 | 36.83 | | C |
| ATOM | 4794 | O | LEU | 598 | 69.664 | 61.385 | −57.727 | 1.00 | 36.83 | | O |
| ATOM | 4795 | N | CYS | 599 | 67.465 | 60.866 | −57.625 | 1.00 | 36.83 | | N |
| ATOM | 4796 | CA | CYS | 599 | 67.071 | 62.085 | −56.945 | 1.00 | 36.83 | | C |
| ATOM | 4797 | CB | CYS | 599 | 65.558 | 62.108 | −56.758 | 1.00 | 36.83 | | C |
| ATOM | 4798 | SG | CYS | 599 | 65.021 | 63.046 | −55.325 | 1.00 | 36.83 | | S |
| ATOM | 4799 | C | CYS | 599 | 67.753 | 62.261 | −55.598 | 1.00 | 36.83 | | C |
| ATOM | 4800 | O | CYS | 599 | 67.969 | 63.394 | −55.149 | 1.00 | 36.83 | | O |
| ATOM | 4801 | N | PHE | 600 | 68.094 | 61.150 | −54.948 | 1.00 | 36.83 | | N |
| ATOM | 4802 | CA | PHE | 600 | 68.749 | 61.241 | −53.652 | 1.00 | 36.83 | | C |
| ATOM | 4803 | CB | PHE | 600 | 68.249 | 60.146 | −52.699 | 1.00 | 36.83 | | C |
| ATOM | 4804 | CG | PHE | 600 | 67.009 | 60.537 | −51.944 | 1.00 | 36.83 | | C |
| ATOM | 4805 | CD1 | PHE | 600 | 65.756 | 60.466 | −52.548 | 1.00 | 36.83 | | C |
| ATOM | 4806 | CD2 | PHE | 600 | 67.102 | 61.047 | −50.650 | 1.00 | 36.83 | | C |
| ATOM | 4807 | CE1 | PHE | 600 | 64.620 | 60.900 | −51.884 | 1.00 | 36.83 | | C |
| ATOM | 4808 | CE2 | PHE | 600 | 65.967 | 61.484 | −49.974 | 1.00 | 36.83 | | C |
| ATOM | 4809 | CZ | PHE | 600 | 64.720 | 61.414 | −50.592 | 1.00 | 36.83 | | C |
| ATOM | 4810 | C | PHE | 600 | 70.270 | 61.269 | −53.673 | 1.00 | 36.83 | | C |
| ATOM | 4811 | O | PHE | 600 | 70.877 | 61.771 | −52.738 | 1.00 | 36.83 | | O |
| ATOM | 4812 | N | LYS | 601 | 70.896 | 60.743 | −54.718 | 1.00 | 36.83 | | N |
| ATOM | 4813 | CA | LYS | 601 | 72.363 | 60.804 | −54.785 | 1.00 | 36.83 | | C |
| ATOM | 4814 | CB | LYS | 601 | 72.915 | 60.041 | −55.997 | 1.00 | 36.83 | | C |
| ATOM | 4815 | CG | LYS | 601 | 72.866 | 58.516 | −55.880 | 1.00 | 36.83 | | C |
| ATOM | 4816 | CD | LYS | 601 | 73.502 | 57.806 | −57.095 | 1.00 | 36.83 | | C |
| ATOM | 4817 | CE | LYS | 601 | 73.304 | 56.285 | −56.993 | 1.00 | 36.83 | | C |
| ATOM | 4818 | NZ | LYS | 601 | 74.186 | 55.465 | −57.887 | 1.00 | 36.83 | | N |
| ATOM | 4819 | C | LYS | 601 | 72.771 | 62.276 | −54.903 | 1.00 | 36.83 | | C |
| ATOM | 4820 | O | LYS | 601 | 73.873 | 62.647 | −54.515 | 1.00 | 36.83 | | O |
| ATOM | 4821 | N | ASP | 602 | 71.879 | 63.102 | −55.449 | 1.00 | 36.83 | | N |
| ATOM | 4822 | CA | ASP | 602 | 72.150 | 64.534 | −55.619 | 1.00 | 36.83 | | C |
| ATOM | 4823 | CB | ASP | 602 | 71.353 | 65.098 | −56.796 | 1.00 | 36.83 | | C |
| ATOM | 4824 | CG | ASP | 602 | 71.788 | 64.531 | −58.122 | 1.00 | 36.83 | | C |
| ATOM | 4825 | OD1 | ASP | 602 | 71.040 | 64.719 | −59.104 | 1.00 | 36.83 | | O |
| ATOM | 4826 | OD2 | ASP | 602 | 72.872 | 63.908 | −58.187 | 1.00 | 36.83 | | O |
| ATOM | 4827 | C | ASP | 602 | 71.788 | 65.343 | −54.377 | 1.00 | 36.83 | | C |
| ATOM | 4828 | O | ASP | 602 | 71.604 | 66.558 | −54.460 | 1.00 | 36.83 | | O |
| ATOM | 4829 | N | SER | 603 | 71.657 | 64.674 | −53.237 | 1.00 | 36.83 | | N |
| ATOM | 4830 | CA | SER | 603 | 71.322 | 65.363 | −52.000 | 1.00 | 36.83 | | C |
| ATOM | 4831 | CB | SER | 603 | 71.000 | 64.351 | −50.901 | 1.00 | 36.83 | | C |
| ATOM | 4832 | OG | SER | 603 | 70.838 | 64.987 | −49.640 | 1.00 | 36.83 | | O |
| ATOM | 4833 | C | SER | 603 | 72.480 | 66.241 | −51.542 | 1.00 | 36.83 | | C |
| ATOM | 4834 | O | SER | 603 | 73.647 | 65.867 | −51.675 | 1.00 | 36.83 | | O |
| ATOM | 4835 | N | SER | 604 | 72.153 | 67.408 | −50.994 | 1.00 | 36.83 | | N |
| ATOM | 4836 | CA | SER | 604 | 73.180 | 68.313 | −50.506 | 1.00 | 36.83 | | C |
| ATOM | 4837 | CB | SER | 604 | 72.621 | 69.737 | −50.339 | 1.00 | 36.83 | | C |
| ATOM | 4838 | OG | SER | 604 | 71.202 | 69.764 | −50.197 | 1.00 | 36.83 | | O |
| ATOM | 4839 | C | SER | 604 | 73.744 | 67.805 | −49.189 | 1.00 | 36.83 | | C |
| ATOM | 4840 | O | SER | 604 | 74.907 | 68.070 | −48.864 | 1.00 | 36.83 | | O |
| ATOM | 4841 | N | ASP | 605 | 72.935 | 67.047 | −48.446 | 1.00 | 36.83 | | N |
| ATOM | 4842 | CA | ASP | 605 | 73.368 | 66.513 | −47.159 | 1.00 | 36.83 | | C |
| ATOM | 4843 | CB | ASP | 605 | 72.180 | 65.957 | −46.355 | 1.00 | 36.83 | | C |
| ATOM | 4844 | CG | ASP | 605 | 72.543 | 65.670 | −44.888 | 1.00 | 36.83 | | C |
| ATOM | 4845 | OD1 | ASP | 605 | 72.324 | 66.561 | −44.031 | 1.00 | 36.83 | | O |
| ATOM | 4846 | OD2 | ASP | 605 | 73.071 | 64.562 | −44.595 | 1.00 | 36.83 | | O |
| ATOM | 4847 | C | ASP | 605 | 74.437 | 65.433 | −47.292 | 1.00 | 36.83 | | C |
| ATOM | 4848 | O | ASP | 605 | 74.302 | 64.457 | −48.041 | 1.00 | 36.83 | | O |
| ATOM | 4849 | N | ASN | 606 | 75.501 | 65.620 | −46.530 | 1.00 | 36.83 | | N |
| ATOM | 4850 | CA | ASN | 606 | 76.629 | 64.711 | −46.507 | 1.00 | 36.83 | | C |
| ATOM | 4851 | CB | ASN | 606 | 77.681 | 65.256 | −45.532 | 1.00 | 36.83 | | C |
| ATOM | 4852 | CG | ASN | 606 | 78.858 | 64.331 | −45.369 | 1.00 | 36.83 | | C |
| ATOM | 4853 | OD1 | ASN | 606 | 79.593 | 64.415 | −44.375 | 1.00 | 36.83 | | O |
| ATOM | 4854 | ND2 | ASN | 606 | 79.061 | 63.449 | −46.342 | 1.00 | 36.83 | | N |
| ATOM | 4855 | C | ASN | 606 | 76.227 | 63.283 | −46.114 | 1.00 | 36.83 | | C |
| ATOM | 4856 | O | ASN | 606 | 76.743 | 62.314 | −46.677 | 1.00 | 36.83 | | O |
| ATOM | 4857 | N | VAL | 607 | 75.313 | 63.149 | −45.152 | 1.00 | 36.83 | | N |
| ATOM | 4858 | CA | VAL | 607 | 74.872 | 61.830 | −44.716 | 1.00 | 36.83 | | C |
| ATOM | 4859 | CB | VAL | 607 | 74.184 | 61.927 | −43.342 | 1.00 | 36.83 | | C |
| ATOM | 4860 | CG1 | VAL | 607 | 73.472 | 60.627 | −42.990 | 1.00 | 36.83 | | C |
| ATOM | 4861 | CG2 | VAL | 607 | 75.244 | 62.228 | −42.281 | 1.00 | 36.83 | | C |
| ATOM | 4862 | C | VAL | 607 | 73.969 | 61.158 | −45.751 | 1.00 | 36.83 | | C |
| ATOM | 4863 | O | VAL | 607 | 74.223 | 60.017 | −46.154 | 1.00 | 36.83 | | O |
| ATOM | 4864 | N | VAL | 608 | 72.938 | 61.865 | −46.203 | 1.00 | 36.83 | | N |
| ATOM | 4865 | CA | VAL | 608 | 72.014 | 61.332 | −47.205 | 1.00 | 36.83 | | C |
| ATOM | 4866 | CB | VAL | 608 | 70.985 | 62.420 | −47.613 | 1.00 | 36.83 | | C |
| ATOM | 4867 | CG1 | VAL | 608 | 70.095 | 61.919 | −48.720 | 1.00 | 36.83 | | C |
| ATOM | 4868 | CG2 | VAL | 608 | 70.145 | 62.820 | −46.408 | 1.00 | 36.83 | | C |
| ATOM | 4869 | C | VAL | 608 | 72.739 | 60.797 | −48.466 | 1.00 | 36.83 | | C |
| ATOM | 4870 | O | VAL | 608 | 72.334 | 59.780 | −49.049 | 1.00 | 36.83 | | O |
| ATOM | 4871 | N | THR | 609 | 73.817 | 61.464 | −48.872 | 1.00 | 36.83 | | N |
| ATOM | 4872 | CA | THR | 609 | 74.580 | 61.068 | −50.062 | 1.00 | 36.83 | | C |
| ATOM | 4873 | CB | THR | 609 | 75.602 | 62.138 | −50.473 | 1.00 | 36.83 | | C |
| ATOM | 4874 | OG1 | THR | 609 | 74.926 | 63.380 | −50.696 | 1.00 | 36.83 | | O |
| ATOM | 4875 | CG2 | THR | 609 | 76.307 | 61.733 | −51.748 | 1.00 | 36.83 | | C |
| ATOM | 4876 | C | THR | 609 | 75.349 | 59.780 | −49.869 | 1.00 | 36.83 | | C |
| ATOM | 4877 | O | THR | 609 | 75.499 | 58.990 | −50.807 | 1.00 | 36.83 | | O |
| ATOM | 4878 | N | LYS | 610 | 75.862 | 59.579 | −48.664 | 1.00 | 36.83 | | N |
| ATOM | 4879 | CA | LYS | 610 | 76.614 | 58.369 | −48.373 | 1.00 | 36.83 | | C |
| ATOM | 4880 | CB | LYS | 610 | 77.219 | 58.443 | −46.972 | 1.00 | 36.83 | | C |
| ATOM | 4881 | CG | LYS | 610 | 78.435 | 57.571 | −46.789 | 1.00 | 36.83 | | C |
| ATOM | 4882 | CD | LYS | 610 | 79.712 | 58.403 | −46.818 | 1.00 | 36.83 | | C |
| ATOM | 4883 | CE | LYS | 610 | 80.374 | 58.431 | −45.429 | 1.00 | 36.83 | | C |
| ATOM | 4884 | NZ | LYS | 610 | 80.719 | 57.043 | −44.950 | 1.00 | 36.83 | | N |
| ATOM | 4885 | C | LYS | 610 | 75.678 | 57.156 | −48.453 | 1.00 | 36.83 | | C |
| ATOM | 4886 | O | LYS | 610 | 76.098 | 56.058 | −48.813 | 1.00 | 36.83 | | O |
| ATOM | 4887 | N | LEU | 611 | 74.406 | 57.362 | −48.117 | 1.00 | 36.83 | | N |
| ATOM | 4888 | CA | LEU | 611 | 73.448 | 56.265 | −48.145 | 1.00 | 36.83 | | C |
| ATOM | 4889 | CB | LEU | 611 | 72.219 | 56.608 | −47.297 | 1.00 | 36.83 | | C |
| ATOM | 4890 | CG | LEU | 611 | 72.590 | 56.911 | −45.841 | 1.00 | 36.83 | | C |
| ATOM | 4891 | CD1 | LEU | 611 | 71.333 | 56.920 | −44.988 | 1.00 | 36.83 | | C |
| ATOM | 4892 | CD2 | LEU | 611 | 73.583 | 55.876 | −45.324 | 1.00 | 36.83 | | C |
| ATOM | 4893 | C | LEU | 611 | 73.033 | 55.865 | −49.554 | 1.00 | 36.83 | | C |
| ATOM | 4894 | O | LEU | 611 | 72.569 | 54.757 | −49.765 | 1.00 | 36.83 | | O |
| ATOM | 4895 | N | PHE | 612 | 73.224 | 56.760 | −50.517 | 1.00 | 36.83 | | N |
| ATOM | 4896 | CA | PHE | 612 | 72.873 | 56.472 | −51.905 | 1.00 | 36.83 | | C |
| ATOM | 4897 | CB | PHE | 612 | 71.854 | 57.502 | −52.400 | 1.00 | 36.83 | | C |
| ATOM | 4898 | CG | PHE | 612 | 70.520 | 57.409 | −51.720 | 1.00 | 36.83 | | C |
| ATOM | 4899 | CD1 | PHE | 612 | 70.299 | 58.033 | −50.490 | 1.00 | 36.83 | | C |
| ATOM | 4900 | CD2 | PHE | 612 | 69.465 | 56.724 | −52.329 | 1.00 | 36.83 | | C |
| ATOM | 4901 | CE1 | PHE | 612 | 69.053 | 57.988 | −49.879 | 1.00 | 36.83 | | C |
| ATOM | 4902 | CE2 | PHE | 612 | 68.199 | 56.668 | −51.724 | 1.00 | 36.83 | | C |
| ATOM | 4903 | CZ | PHE | 612 | 67.993 | 57.306 | −50.496 | 1.00 | 36.83 | | C |
| ATOM | 4904 | C | PHE | 612 | 74.061 | 56.378 | −52.892 | 1.00 | 36.83 | | C |
| ATOM | 4905 | O | PHE | 612 | 73.863 | 56.205 | −54.094 | 1.00 | 36.83 | | O |
| ATOM | 4906 | N | ASN | 613 | 75.286 | 56.462 | −52.374 | 1.00 | 36.83 | | N |
| ATOM | 4907 | CA | ASN | 613 | 76.506 | 56.373 | −53.179 | 1.00 | 36.83 | | C |
| ATOM | 4908 | CB | ASN | 613 | 77.251 | 57.713 | −53.155 | 1.00 | 36.83 | | C |
| ATOM | 4909 | CG | ASN | 613 | 76.794 | 58.657 | −54.247 | 1.00 | 36.83 | | C |
| ATOM | 4910 | OD1 | ASN | 613 | 77.131 | 58.476 | −55.415 | 1.00 | 36.83 | | O |
| ATOM | 4911 | ND2 | ASN | 613 | 76.015 | 59.666 | −53.877 | 1.00 | 36.83 | | N |
| ATOM | 4912 | C | ASN | 613 | 77.439 | 55.260 | −52.669 | 1.00 | 36.83 | | C |
| ATOM | 4913 | O | ASN | 613 | 78.019 | 54.505 | −53.449 | 1.00 | 36.83 | | O |
| ATOM | 4914 | N | ASP | 614 | 77.599 | 55.171 | −51.354 | 1.00 | 36.83 | | N |
| ATOM | 4915 | CA | ASP | 614 | 78.447 | 54.144 | −50.764 | 1.00 | 36.83 | | C |
| ATOM | 4916 | CB | ASP | 614 | 78.310 | 54.158 | −49.240 | 1.00 | 36.83 | | C |
| ATOM | 4917 | CG | ASP | 614 | 79.303 | 53.236 | −48.557 | 1.00 | 36.83 | | C |
| ATOM | 4918 | OD1 | ASP | 614 | 79.374 | 52.034 | −48.909 | 1.00 | 36.83 | | O |
| ATOM | 4919 | OD2 | ASP | 614 | 80.018 | 53.718 | −47.654 | 1.00 | 36.83 | | O |
| ATOM | 4920 | C | ASP | 614 | 78.028 | 52.766 | −51.283 | 1.00 | 36.83 | | C |
| ATOM | 4921 | O | ASP | 614 | 76.930 | 52.286 | −50.996 | 1.00 | 36.83 | | O |
| ATOM | 4922 | N | PRO | 615 | 78.912 | 52.109 | −52.040 | 1.00 | 36.83 | | N |
| ATOM | 4923 | CD | PRO | 615 | 80.324 | 52.502 | −52.218 | 1.00 | 36.83 | | C |
| ATOM | 4924 | CA | PRO | 615 | 78.665 | 50.780 | −52.611 | 1.00 | 36.83 | | C |
| ATOM | 4925 | CB | PRO | 615 | 79.975 | 50.475 | −53.327 | 1.00 | 36.83 | | C |
| ATOM | 4926 | CG | PRO | 615 | 80.998 | 51.164 | −52.437 | 1.00 | 36.83 | | C |
| ATOM | 4927 | C | PRO | 615 | 78.345 | 49.746 | −51.527 | 1.00 | 36.83 | | C |
| ATOM | 4928 | O | PRO | 615 | 77.604 | 48.781 | −51.755 | 1.00 | 36.83 | | O |
| ATOM | 4929 | N | ASN | 616 | 78.902 | 49.950 | −50.342 | 1.00 | 36.83 | | N |
| ATOM | 4930 | CA | ASN | 616 | 78.657 | 49.017 | −49.248 | 1.00 | 36.83 | | C |
| ATOM | 4931 | CB | ASN | 616 | 79.874 | 48.931 | −48.328 | 1.00 | 36.83 | | C |
| ATOM | 4932 | CG | ASN | 616 | 81.063 | 48.296 | −49.007 | 1.00 | 36.83 | | C |
| ATOM | 4933 | OD1 | ASN | 616 | 80.904 | 47.491 | −49.937 | 1.00 | 36.83 | | O |
| ATOM | 4934 | ND2 | ASN | 616 | 82.267 | 48.635 | −48.541 | 1.00 | 36.83 | | N |
| ATOM | 4935 | C | ASN | 616 | 77.426 | 49.367 | −48.422 | 1.00 | 36.83 | | C |
| ATOM | 4936 | O | ASN | 616 | 77.300 | 48.914 | −47.284 | 1.00 | 36.83 | | O |
| ATOM | 4937 | N | ILE | 617 | 76.518 | 50.157 | −48.997 | 1.00 | 36.83 | | N |
| ATOM | 4938 | CA | ILE | 617 | 75.299 | 50.556 | −48.299 | 1.00 | 36.83 | | C |
| ATOM | 4939 | CB | ILE | 617 | 75.472 | 51.932 | −47.619 | 1.00 | 36.83 | | C |
| ATOM | 4940 | CG2 | ILE | 617 | 74.138 | 52.406 | −47.079 | 1.00 | 36.83 | | C |
| ATOM | 4941 | CG1 | ILE | 617 | 76.536 | 51.839 | −46.513 | 1.00 | 36.83 | | C |
| ATOM | 4942 | CD1 | ILE | 617 | 76.764 | 53.120 | −45.759 | 1.00 | 36.83 | | C |
| ATOM | 4943 | C | ILE | 617 | 74.103 | 50.643 | −49.245 | 1.00 | 36.83 | | C |
| ATOM | 4944 | O | ILE | 617 | 72.999 | 50.211 | −48.903 | 1.00 | 36.83 | | O |
| ATOM | 4945 | N | ALA | 618 | 74.330 | 51.201 | −50.432 | 1.00 | 36.83 | | N |
| ATOM | 4946 | CA | ALA | 618 | 73.272 | 51.374 | −51.420 | 1.00 | 36.83 | | C |
| ATOM | 4947 | CB | ALA | 618 | 73.171 | 52.855 | −51.808 | 1.00 | 36.83 | | C |
| ATOM | 4948 | C | ALA | 618 | 73.424 | 50.520 | −52.683 | 1.00 | 36.83 | | C |
| ATOM | 4949 | O | ALA | 618 | 72.751 | 50.774 | −53.690 | 1.00 | 36.83 | | O |
| ATOM | 4950 | N | SER | 619 | 74.294 | 49.513 | −52.642 | 1.00 | 36.83 | | N |
| ATOM | 4951 | CA | SER | 619 | 74.483 | 48.661 | −53.809 | 1.00 | 36.83 | | C |
| ATOM | 4952 | CB | SER | 619 | 75.937 | 48.202 | −53.903 | 1.00 | 36.83 | | C |
| ATOM | 4953 | OG | SER | 619 | 76.217 | 47.708 | −55.201 | 1.00 | 36.83 | | O |
| ATOM | 4954 | C | SER | 619 | 73.564 | 47.456 | −53.706 | 1.00 | 36.83 | | C |
| ATOM | 4955 | O | SER | 619 | 72.787 | 47.354 | −52.770 | 1.00 | 36.83 | | O |
| ATOM | 4956 | N | ARG | 620 | 73.648 | 46.536 | −54.658 | 1.00 | 36.83 | | N |
| ATOM | 4957 | CA | ARG | 620 | 72.781 | 45.355 | −54.631 | 1.00 | 36.83 | | C |
| ATOM | 4958 | CB | ARG | 620 | 71.393 | 45.699 | −55.203 | 1.00 | 36.83 | | C |
| ATOM | 4959 | CG | ARG | 620 | 70.483 | 46.501 | −54.287 | 1.00 | 36.83 | | C |
| ATOM | 4960 | CD | ARG | 620 | 69.749 | 45.597 | −53.289 | 1.00 | 36.83 | | C |
| ATOM | 4961 | NE | ARG | 620 | 68.959 | 44.560 | −53.964 | 1.00 | 36.83 | | N |
| ATOM | 4962 | CZ | ARG | 620 | 68.160 | 43.699 | −53.339 | 1.00 | 36.83 | | C |
| ATOM | 4963 | NH1 | ARG | 620 | 68.033 | 43.748 | −52.015 | 1.00 | 36.83 | | N |
| ATOM | 4964 | NH2 | ARG | 620 | 67.497 | 42.784 | −54.037 | 1.00 | 36.83 | | N |
| ATOM | 4965 | C | ARG | 620 | 73.370 | 44.216 | −55.444 | 1.00 | 36.83 | | C |
| ATOM | 4966 | O | ARG | 620 | 73.562 | 44.358 | −56.649 | 1.00 | 36.83 | | O |
| ATOM | 4967 | N | ALA | 621 | 73.612 | 43.082 | −54.793 | 1.00 | 36.83 | | N |
| ATOM | 4968 | CA | ALA | 621 | 74.175 | 41.894 | −55.442 | 1.00 | 36.83 | | C |
| ATOM | 4969 | CB | ALA | 621 | 74.350 | 40.790 | −54.402 | 1.00 | 36.83 | | C |
| ATOM | 4970 | C | ALA | 621 | 73.347 | 41.360 | −56.613 | 1.00 | 36.83 | | C |
| ATOM | 4971 | O | ALA | 621 | 72.116 | 41.260 | −56.515 | 1.00 | 36.83 | | O |
| ATOM | 4972 | N | LYS | 622 | 74.023 | 41.001 | −57.707 | 1.00 | 36.83 | | N |
| ATOM | 4973 | CA | LYS | 622 | 73.365 | 40.460 | −58.898 | 1.00 | 36.83 | | C |
| ATOM | 4974 | CB | LYS | 622 | 74.137 | 40.857 | −60.163 | 1.00 | 36.83 | | C |
| ATOM | 4975 | CG | LYS | 622 | 74.221 | 42.359 | −60.423 | 1.00 | 36.83 | | C |
| ATOM | 4976 | CD | LYS | 622 | 75.642 | 42.768 | −60.823 | 1.00 | 36.83 | | C |
| ATOM | 4977 | CE | LYS | 622 | 76.574 | 42.906 | −59.607 | 1.00 | 36.83 | | C |
| ATOM | 4978 | NZ | LYS | 622 | 76.294 | 44.132 | −58.778 | 1.00 | 36.83 | | N |
| ATOM | 4979 | C | LYS | 622 | 73.288 | 38.928 | −58.831 | 1.00 | 36.83 | | C |
| ATOM | 4980 | O | LYS | 622 | 74.272 | 38.233 | −59.097 | 1.00 | 36.83 | | O |
| ATOM | 4981 | N | LYS | 623 | 72.126 | 38.395 | −58.477 | 1.00 | 36.83 | | N |
| ATOM | 4982 | CA | LYS | 623 | 71.975 | 36.946 | −58.393 | 1.00 | 36.83 | | C |
| ATOM | 4983 | CB | LYS | 623 | 70.898 | 36.572 | −57.369 | 1.00 | 36.83 | | C |
| ATOM | 4984 | CG | LYS | 623 | 70.552 | 35.067 | −57.332 | 1.00 | 36.83 | | C |
| ATOM | 4985 | CD | LYS | 623 | 71.590 | 34.248 | −56.579 | 1.00 | 36.83 | | C |
| ATOM | 4986 | CE | LYS | 623 | 71.303 | 34.246 | −55.082 | 1.00 | 36.83 | | C |
| ATOM | 4987 | NZ | LYS | 623 | 70.017 | 33.531 | −54.779 | 1.00 | 36.83 | | N |
| ATOM | 4988 | C | LYS | 623 | 71.574 | 36.500 | −59.776 | 1.00 | 36.83 | | C |
| ATOM | 4989 | O | LYS | 623 | 70.450 | 36.027 | −60.001 | 1.00 | 36.83 | | O |
| ATOM | 4990 | N | GLY | 624 | 72.500 | 36.665 | −60.713 | 1.00 | 36.83 | | N |
| ATOM | 4991 | CA | GLY | 624 | 72.219 | 36.304 | −62.088 | 1.00 | 36.83 | | C |
| ATOM | 4992 | C | GLY | 624 | 71.757 | 37.546 | −62.827 | 1.00 | 36.83 | | C |
| ATOM | 4993 | O | GLY | 624 | 72.478 | 38.549 | −62.858 | 1.00 | 36.83 | | O |
| ATOM | 4994 | N | ALA | 625 | 70.558 | 37.479 | −63.407 | 1.00 | 36.83 | | N |
| ATOM | 4995 | CA | ALA | 625 | 69.961 | 38.583 | −64.161 | 1.00 | 36.83 | | C |
| ATOM | 4996 | CB | ALA | 625 | 69.101 | 38.023 | −65.303 | 1.00 | 36.83 | | C |
| ATOM | 4997 | C | ALA | 625 | 69.115 | 39.516 | −63.284 | 1.00 | 36.83 | | C |
| ATOM | 4998 | O | ALA | 625 | 68.669 | 40.571 | −63.736 | 1.00 | 36.83 | | O |
| ATOM | 4999 | N | ASN | 626 | 68.883 | 39.116 | −62.037 | 1.00 | 36.83 | | N |
| ATOM | 5000 | CA | ASN | 626 | 68.112 | 39.924 | −61.104 | 1.00 | 36.83 | | C |
| ATOM | 5001 | CB | ASN | 626 | 66.825 | 39.197 | −60.694 | 1.00 | 36.83 | | C |
| ATOM | 5002 | CG | ASN | 626 | 65.914 | 38.911 | −61.869 | 1.00 | 36.83 | | C |
| ATOM | 5003 | OD1 | ASN | 626 | 65.399 | 39.838 | −62.511 | 1.00 | 36.83 | | O |
| ATOM | 5004 | ND2 | ASN | 626 | 65.712 | 37.618 | −62.166 | 1.00 | 36.83 | | N |
| ATOM | 5005 | C | ASN | 626 | 68.910 | 40.222 | −59.835 | 1.00 | 36.83 | | C |
| ATOM | 5006 | O | ASN | 626 | 69.998 | 39.663 | −59.596 | 1.00 | 36.83 | | O |
| ATOM | 5007 | N | PHE | 627 | 68.334 | 41.092 | −59.009 | 1.00 | 36.83 | | N |
| ATOM | 5008 | CA | PHE | 627 | 68.938 | 41.463 | −57.742 | 1.00 | 36.83 | | C |
| ATOM | 5009 | CB | PHE | 627 | 68.262 | 42.719 | −57.182 | 1.00 | 36.83 | | C |
| ATOM | 5010 | CG | PHE | 627 | 68.557 | 43.974 | −57.966 | 1.00 | 36.83 | | C |
| ATOM | 5011 | CD1 | PHE | 627 | 69.880 | 44.388 | −58.180 | 1.00 | 36.83 | | C |
| ATOM | 5012 | CD2 | PHE | 627 | 67.513 | 44.762 | −58.471 | 1.00 | 36.83 | | C |
| ATOM | 5013 | CE1 | PHE | 627 | 70.160 | 45.569 | −58.882 | 1.00 | 36.83 | | C |
| ATOM | 5014 | CE2 | PHE | 627 | 67.782 | 45.948 | −59.178 | 1.00 | 36.83 | | C |
| ATOM | 5015 | CZ | PHE | 627 | 69.105 | 46.352 | −59.383 | 1.00 | 36.83 | | C |
| ATOM | 5016 | C | PHE | 627 | 68.748 | 40.295 | −56.781 | 1.00 | 36.83 | | C |
| ATOM | 5017 | O | PHE | 627 | 67.717 | 39.618 | −56.818 | 1.00 | 36.83 | | O |
| ATOM | 5018 | N | ILE | 628 | 69.750 | 40.043 | −55.937 | 1.00 | 36.83 | | N |
| ATOM | 5019 | CA | ILE | 628 | 69.648 | 38.953 | −54.969 | 1.00 | 36.83 | | C |
| ATOM | 5020 | CB | ILE | 628 | 70.910 | 38.875 | −54.050 | 1.00 | 36.83 | | C |
| ATOM | 5021 | CG2 | ILE | 628 | 71.013 | 40.118 | −53.164 | 1.00 | 36.83 | | C |
| ATOM | 5022 | CG1 | ILE | 628 | 70.847 | 37.619 | −53.181 | 1.00 | 36.83 | | C |
| ATOM | 5023 | CD1 | ILE | 628 | 72.084 | 37.413 | −52.306 | 1.00 | 36.83 | | C |
| ATOM | 5024 | C | ILE | 628 | 68.402 | 39.214 | −54.120 | 1.00 | 36.83 | | C |
| ATOM | 5025 | O | ILE | 628 | 68.124 | 40.356 | −53.760 | 1.00 | 36.83 | | O |
| ATOM | 5026 | N | THR | 629 | 67.647 | 38.166 | −53.809 | 1.00 | 36.83 | | N |
| ATOM | 5027 | CA | THR | 629 | 66.449 | 38.355 | −53.007 | 1.00 | 36.83 | | C |
| ATOM | 5028 | CB | THR | 629 | 65.477 | 37.179 | −53.152 | 1.00 | 36.83 | | C |
| ATOM | 5029 | OG1 | THR | 629 | 66.074 | 35.983 | −52.635 | 1.00 | 36.83 | | O |
| ATOM | 5030 | CG2 | THR | 629 | 65.111 | 36.985 | −54.604 | 1.00 | 36.83 | | C |
| ATOM | 5031 | C | THR | 629 | 66.798 | 38.513 | −51.538 | 1.00 | 36.83 | | C |
| ATOM | 5032 | O | THR | 629 | 67.865 | 38.066 | −51.091 | 1.00 | 36.83 | | O |
| ATOM | 5033 | N | VAL | 630 | 65.911 | 39.186 | −50.805 | 1.00 | 36.83 | | N |
| ATOM | 5034 | CA | VAL | 630 | 66.073 | 39.385 | −49.373 | 1.00 | 36.83 | | C |
| ATOM | 5035 | CB | VAL | 630 | 64.839 | 40.094 | −48.748 | 1.00 | 36.83 | | C |
| ATOM | 5036 | CG1 | VAL | 630 | 64.903 | 40.003 | −47.239 | 1.00 | 36.83 | | C |
| ATOM | 5037 | CG2 | VAL | 630 | 64.781 | 41.560 | −49.183 | 1.00 | 36.83 | | C |
| ATOM | 5038 | C | VAL | 630 | 66.207 | 37.994 | −48.757 | 1.00 | 36.83 | | C |
| ATOM | 5039 | O | VAL | 630 | 67.049 | 37.769 | −47.897 | 1.00 | 36.83 | | O |
| ATOM | 5040 | N | ALA | 631 | 65.380 | 37.058 | −49.211 | 1.00 | 36.83 | | N |
| ATOM | 5041 | CA | ALA | 631 | 65.434 | 35.689 | −48.709 | 1.00 | 36.83 | | C |
| ATOM | 5042 | CB | ALA | 631 | 64.425 | 34.837 | −49.434 | 1.00 | 36.83 | | C |
| ATOM | 5043 | C | ALA | 631 | 66.832 | 35.082 | −48.879 | 1.00 | 36.83 | | C |
| ATOM | 5044 | O | ALA | 631 | 67.389 | 34.538 | −47.935 | 1.00 | 36.83 | | O |
| ATOM | 5045 | N | ALA | 632 | 67.382 | 35.172 | −50.088 | 1.00 | 36.83 | | N |
| ATOM | 5046 | CA | ALA | 632 | 68.711 | 34.634 | −50.394 | 1.00 | 36.83 | | C |
| ATOM | 5047 | CB | ALA | 632 | 68.997 | 34.772 | −51.870 | 1.00 | 36.83 | | C |
| ATOM | 5048 | C | ALA | 632 | 69.809 | 35.330 | −49.577 | 1.00 | 36.83 | | C |
| ATOM | 5049 | O | ALA | 632 | 70.685 | 34.678 | −49.030 | 1.00 | 36.83 | | O |
| ATOM | 5050 | N | GLN | 633 | 69.792 | 36.630 | −49.568 | 1.00 | 36.83 | | N |
| ATOM | 5051 | CA | GLN | 633 | 70.642 | 37.391 | −48.733 | 1.00 | 36.83 | | C |
| ATOM | 5052 | CB | GLN | 633 | 70.205 | 38.814 | −48.829 | 1.00 | 36.83 | | C |
| ATOM | 5053 | CG | GLN | 633 | 71.165 | 39.748 | −48.320 | 1.00 | 36.83 | | C |
| ATOM | 5054 | CD | GLN | 633 | 70.585 | 41.108 | −48.181 | 1.00 | 36.83 | | C |
| ATOM | 5055 | OE1 | GLN | 633 | 70.594 | 41.684 | −47.108 | 1.00 | 36.83 | | O |
| ATOM | 5056 | NE2 | GLN | 633 | 70.055 | 41.626 | −49.264 | 1.00 | 36.83 | | N |
| ATOM | 5057 | C | GLN | 633 | 70.679 | 36.940 | −47.288 | 1.00 | 36.83 | | C |
| ATOM | 5058 | O | GLN | 633 | 71.716 | 36.709 | −46.749 | 1.00 | 36.83 | | O |
| ATOM | 5059 | N | TYR | 634 | 69.538 | 36.866 | −46.652 | 1.00 | 36.83 | | N |
| ATOM | 5060 | CA | TYR | 634 | 69.493 | 36.476 | −45.249 | 1.00 | 36.83 | | C |
| ATOM | 5061 | CB | TYR | 634 | 68.097 | 36.654 | −44.648 | 1.00 | 36.83 | | C |
| ATOM | 5062 | CG | TYR | 634 | 68.113 | 36.399 | −43.162 | 1.00 | 36.83 | | C |
| ATOM | 5063 | CD1 | TYR | 634 | 68.865 | 37.207 | −42.313 | 1.00 | 36.83 | | C |
| ATOM | 5064 | CE1 | TYR | 634 | 68.944 | 36.949 | −40.957 | 1.00 | 36.83 | | C |
| ATOM | 5065 | CD2 | TYR | 634 | 67.434 | 35.319 | −42.610 | 1.00 | 36.83 | | C |
| ATOM | 5066 | CE2 | TYR | 634 | 67.505 | 35.046 | −41.244 | 1.00 | 36.83 | | C |
| ATOM | 5067 | CZ | TYR | 634 | 68.260 | 35.872 | −40.426 | 1.00 | 36.83 | | C |
| ATOM | 5068 | OH | TYR | 634 | 68.292 | 35.654 | −39.071 | 1.00 | 36.83 | | O |
| ATOM | 5069 | C | TYR | 634 | 69.965 | 35.056 | −44.969 | 1.00 | 36.83 | | C |
| ATOM | 5070 | O | TYR | 634 | 70.655 | 34.814 | −43.973 | 1.00 | 36.83 | | O |
| ATOM | 5071 | N | LYS | 635 | 69.585 | 34.119 | −45.832 | 1.00 | 36.83 | | N |
| ATOM | 5072 | CA | LYS | 635 | 69.992 | 32.731 | −45.651 | 1.00 | 36.83 | | C |
| ATOM | 5073 | CB | LYS | 635 | 69.456 | 31.854 | −46.785 | 1.00 | 36.83 | | C |
| ATOM | 5074 | CG | LYS | 635 | 69.633 | 30.350 | −46.557 | 1.00 | 36.83 | | C |
| ATOM | 5075 | CD | LYS | 635 | 69.194 | 29.516 | −47.769 | 1.00 | 36.83 | | C |
| ATOM | 5076 | CE | LYS | 635 | 69.311 | 27.993 | −47.487 | 1.00 | 36.83 | | C |
| ATOM | 5077 | NZ | LYS | 635 | 69.214 | 27.136 | −48.714 | 1.00 | 36.83 | | N |
| ATOM | 5078 | C | LYS | 635 | 71.513 | 32.645 | −45.608 | 1.00 | 36.83 | | C |
| ATOM | 5079 | O | LYS | 635 | 72.058 | 31.906 | −44.798 | 1.00 | 36.83 | | O |
| ATOM | 5080 | N | GLU | 636 | 72.202 | 33.400 | −46.462 | 1.00 | 36.83 | | N |
| ATOM | 5081 | CA | GLU | 636 | 73.670 | 33.373 | −46.481 | 1.00 | 36.83 | | C |
| ATOM | 5082 | CB | GLU | 636 | 74.228 | 34.093 | −47.709 | 1.00 | 36.83 | | C |
| ATOM | 5083 | CG | GLU | 636 | 75.446 | 33.404 | −48.343 | 1.00 | 36.83 | | C |
| ATOM | 5084 | CD | GLU | 636 | 76.687 | 33.336 | −47.428 | 1.00 | 36.83 | | C |
| ATOM | 5085 | OE1 | GLU | 636 | 77.662 | 32.618 | −47.800 | 1.00 | 36.83 | | O |
| ATOM | 5086 | OE2 | GLU | 636 | 76.702 | 33.997 | −46.350 | 1.00 | 36.83 | | O |
| ATOM | 5087 | C | GLU | 636 | 74.257 | 34.013 | −45.225 | 1.00 | 36.83 | | C |
| ATOM | 5088 | O | GLU | 636 | 75.225 | 33.507 | −44.679 | 1.00 | 36.83 | | O |
| ATOM | 5089 | N | GLN | 637 | 73.686 | 35.118 | −44.794 | 1.00 | 36.83 | | N |
| ATOM | 5090 | CA | GLN | 637 | 74.141 | 35.727 | −43.578 | 1.00 | 36.83 | | C |
| ATOM | 5091 | CB | GLN | 637 | 73.520 | 37.072 | −43.349 | 1.00 | 36.83 | | C |
| ATOM | 5092 | CG | GLN | 637 | 73.909 | 38.090 | −44.339 | 1.00 | 36.83 | | C |
| ATOM | 5093 | CD | GLN | 637 | 73.024 | 39.275 | −44.297 | 1.00 | 36.83 | | C |
| ATOM | 5094 | OE1 | GLN | 637 | 73.057 | 40.113 | −45.170 | 1.00 | 36.83 | | O |
| ATOM | 5095 | NE2 | GLN | 637 | 72.217 | 39.358 | −43.281 | 1.00 | 36.83 | | N |
| ATOM | 5096 | C | GLN | 637 | 73.965 | 34.841 | −42.385 | 1.00 | 36.83 | | C |
| ATOM | 5097 | O | GLN | 637 | 74.819 | 34.779 | −41.557 | 1.00 | 36.83 | | O |
| ATOM | 5098 | N | LEU | 638 | 72.845 | 34.160 | −42.318 | 1.00 | 36.83 | | N |
| ATOM | 5099 | CA | LEU | 638 | 72.562 | 33.250 | −41.223 | 1.00 | 36.83 | | C |
| ATOM | 5100 | CB | LEU | 638 | 71.113 | 32.755 | −41.286 | 1.00 | 36.83 | | C |
| ATOM | 5101 | CG | LEU | 638 | 70.690 | 31.751 | −40.200 | 1.00 | 36.83 | | C |
| ATOM | 5102 | CD1 | LEU | 638 | 71.058 | 32.273 | −38.810 | 1.00 | 36.83 | | C |
| ATOM | 5103 | CD2 | LEU | 638 | 69.185 | 31.498 | −40.291 | 1.00 | 36.83 | | C |
| ATOM | 5104 | C | LEU | 638 | 73.525 | 32.074 | −41.305 | 1.00 | 36.83 | | C |
| ATOM | 5105 | O | LEU | 638 | 73.979 | 31.568 | −40.287 | 1.00 | 36.83 | | O |
| ATOM | 5106 | N | ALA | 639 | 73.833 | 31.641 | −42.525 | 1.00 | 36.83 | | N |
| ATOM | 5107 | CA | ALA | 639 | 74.764 | 30.532 | −42.721 | 1.00 | 36.83 | | C |
| ATOM | 5108 | CB | ALA | 639 | 74.780 | 30.098 | −44.188 | 1.00 | 36.83 | | C |
| ATOM | 5109 | C | ALA | 639 | 76.169 | 30.952 | −42.279 | 1.00 | 36.83 | | C |
| ATOM | 5110 | O | ALA | 639 | 76.878 | 30.189 | −41.631 | 1.00 | 36.83 | | O |
| ATOM | 5111 | N | SER | 640 | 76.573 | 32.166 | −42.628 | 1.00 | 36.83 | | N |
| ATOM | 5112 | CA | SER | 640 | 77.890 | 32.633 | −42.226 | 1.00 | 36.83 | | C |
| ATOM | 5113 | CB | SER | 640 | 78.166 | 34.022 | −42.803 | 1.00 | 36.83 | | C |
| ATOM | 5114 | OG | SER | 640 | 79.316 | 34.594 | −42.204 | 1.00 | 36.83 | | O |
| ATOM | 5115 | C | SER | 640 | 77.977 | 32.683 | −40.700 | 1.00 | 36.83 | | C |
| ATOM | 5116 | O | SER | 640 | 78.975 | 32.249 | −40.112 | 1.00 | 36.83 | | O |
| ATOM | 5117 | N | LEU | 641 | 76.935 | 33.219 | −40.062 | 1.00 | 36.83 | | N |
| ATOM | 5118 | CA | LEU | 641 | 76.895 | 33.321 | −38.604 | 1.00 | 36.83 | | C |
| ATOM | 5119 | CB | LEU | 641 | 75.556 | 33.897 | −38.125 | 1.00 | 36.83 | | C |
| ATOM | 5120 | CG | LEU | 641 | 75.329 | 33.868 | −36.604 | 1.00 | 36.83 | | C |
| ATOM | 5121 | CD1 | LEU | 641 | 76.376 | 34.742 | −35.921 | 1.00 | 36.83 | | C |
| ATOM | 5122 | CD2 | LEU | 641 | 73.926 | 34.364 | −36.257 | 1.00 | 36.83 | | C |
| ATOM | 5123 | C | LEU | 641 | 77.090 | 31.961 | −37.961 | 1.00 | 36.83 | | C |
| ATOM | 5124 | O | LEU | 641 | 77.936 | 31.795 | −37.082 | 1.00 | 36.83 | | O |
| ATOM | 5125 | N | MET | 642 | 76.302 | 30.992 | −38.411 | 1.00 | 36.83 | | N |
| ATOM | 5126 | CA | MET | 642 | 76.368 | 29.644 | −37.879 | 1.00 | 36.83 | | C |
| ATOM | 5127 | CB | MET | 642 | 75.302 | 28.769 | −38.538 | 1.00 | 36.83 | | C |
| ATOM | 5128 | CG | MET | 642 | 73.887 | 29.276 | −38.342 | 1.00 | 36.83 | | C |
| ATOM | 5129 | SD | MET | 642 | 73.518 | 29.590 | −36.615 | 1.00 | 36.83 | | S |
| ATOM | 5130 | CE | MET | 642 | 73.696 | 27.919 | −35.977 | 1.00 | 36.83 | | C |
| ATOM | 5131 | C | MET | 642 | 77.752 | 29.041 | −38.097 | 1.00 | 36.83 | | C |
| ATOM | 5132 | O | MET | 642 | 78.256 | 28.287 | −37.246 | 1.00 | 36.83 | | O |
| ATOM | 5133 | N | ALA | 643 | 78.357 | 29.361 | −39.242 | 1.00 | 36.83 | | N |
| ATOM | 5134 | CA | ALA | 643 | 79.696 | 28.868 | −39.556 | 1.00 | 36.83 | | C |
| ATOM | 5135 | CB | ALA | 643 | 80.147 | 29.379 | −40.926 | 1.00 | 36.83 | | C |
| ATOM | 5136 | C | ALA | 643 | 80.637 | 29.368 | −38.459 | 1.00 | 36.83 | | C |
| ATOM | 5137 | O | ALA | 643 | 81.428 | 28.604 | −37.904 | 1.00 | 36.83 | | O |
| ATOM | 5138 | N | THR | 644 | 80.532 | 30.653 | −38.136 | 1.00 | 36.83 | | N |
| ATOM | 5139 | CA | THR | 644 | 81.362 | 31.233 | −37.093 | 1.00 | 36.83 | | C |
| ATOM | 5140 | CB | THR | 644 | 81.117 | 32.737 | −36.995 | 1.00 | 36.83 | | C |
| ATOM | 5141 | OG1 | THR | 644 | 81.648 | 33.369 | −38.167 | 1.00 | 36.83 | | O |
| ATOM | 5142 | CG2 | THR | 644 | 81.781 | 33.316 | −35.754 | 1.00 | 36.83 | | C |
| ATOM | 5143 | C | THR | 644 | 81.122 | 30.585 | −35.723 | 1.00 | 36.83 | | C |
| ATOM | 5144 | O | THR | 644 | 82.058 | 30.375 | −34.945 | 1.00 | 36.83 | | O |
| ATOM | 5145 | N | LEU | 645 | 79.868 | 30.250 | −35.438 | 1.00 | 36.83 | | N |
| ATOM | 5146 | CA | LEU | 645 | 79.544 | 29.637 | −34.160 | 1.00 | 36.83 | | C |
| ATOM | 5147 | CB | LEU | 645 | 78.026 | 29.587 | −33.968 | 1.00 | 36.83 | | C |
| ATOM | 5148 | CG | LEU | 645 | 77.365 | 30.967 | −33.854 | 1.00 | 36.83 | | C |
| ATOM | 5149 | CD1 | LEU | 645 | 75.856 | 30.854 | −34.048 | 1.00 | 36.83 | | C |
| ATOM | 5150 | CD2 | LEU | 645 | 77.698 | 31.573 | −32.497 | 1.00 | 36.83 | | C |
| ATOM | 5151 | C | LEU | 645 | 80.139 | 28.233 | −34.042 | 1.00 | 36.83 | | C |
| ATOM | 5152 | O | LEU | 645 | 80.523 | 27.804 | −32.967 | 1.00 | 36.83 | | O |
| ATOM | 5153 | N | GLU | 646 | 80.229 | 27.523 | −35.154 | 1.00 | 36.83 | | N |
| ATOM | 5154 | CA | GLU | 646 | 80.765 | 26.177 | −35.100 | 1.00 | 36.83 | | C |
| ATOM | 5155 | CB | GLU | 646 | 80.543 | 25.453 | −36.430 | 1.00 | 36.83 | | C |
| ATOM | 5156 | CG | GLU | 646 | 80.744 | 23.946 | −36.332 | 1.00 | 36.83 | | C |
| ATOM | 5157 | CD | GLU | 646 | 79.657 | 23.275 | −35.495 | 1.00 | 36.83 | | C |
| ATOM | 5158 | OE1 | GLU | 646 | 79.986 | 22.684 | −34.439 | 1.00 | 36.83 | | O |
| ATOM | 5159 | OE2 | GLU | 646 | 78.466 | 23.345 | −35.897 | 1.00 | 36.83 | | O |
| ATOM | 5160 | C | GLU | 646 | 82.253 | 26.202 | −34.771 | 1.00 | 36.83 | | C |
| ATOM | 5161 | O | GLU | 646 | 82.839 | 25.159 | −34.526 | 1.00 | 36.83 | | O |
| ATOM | 5162 | N | THR | 647 | 82.857 | 27.393 | −34.753 | 1.00 | 36.83 | | N |
| ATOM | 5163 | CA | THR | 647 | 84.280 | 27.510 | −34.459 | 1.00 | 36.83 | | C |
| ATOM | 5164 | CB | THR | 647 | 84.997 | 28.481 | −35.440 | 1.00 | 36.83 | | C |
| ATOM | 5165 | OG1 | THR | 647 | 84.859 | 29.833 | −34.985 | 1.00 | 36.83 | | O |
| ATOM | 5166 | CG2 | THR | 647 | 84.394 | 28.354 | −36.836 | 1.00 | 36.83 | | C |
| ATOM | 5167 | C | THR | 647 | 84.538 | 27.972 | −33.035 | 1.00 | 36.83 | | C |
| ATOM | 5168 | O | THR | 647 | 85.680 | 28.027 | −32.594 | 1.00 | 36.83 | | O |
| ATOM | 5169 | N | THR | 648 | 83.480 | 28.305 | −32.308 | 1.00 | 36.83 | | N |
| ATOM | 5170 | CA | THR | 648 | 83.647 | 28.738 | −30.928 | 1.00 | 36.83 | | C |
| ATOM | 5171 | CB | THR | 648 | 82.835 | 30.022 | −30.609 | 1.00 | 36.83 | | C |
| ATOM | 5172 | OG1 | THR | 648 | 81.436 | 29.712 | −30.566 | 1.00 | 36.83 | | O |
| ATOM | 5173 | CG2 | THR | 648 | 83.075 | 31.090 | −31.663 | 1.00 | 36.83 | | C |
| ATOM | 5174 | C | THR | 648 | 83.141 | 27.640 | −30.022 | 1.00 | 36.83 | | C |
| ATOM | 5175 | O | THR | 648 | 82.468 | 26.712 | −30.478 | 1.00 | 36.83 | | O |
| ATOM | 5176 | N | ASN | 649 | 83.493 | 27.732 | −28.746 | 1.00 | 36.83 | | N |
| ATOM | 5177 | CA | ASN | 649 | 83.024 | 26.792 | −27.741 | 1.00 | 36.83 | | C |
| ATOM | 5178 | CB | ASN | 649 | 84.056 | 26.597 | −26.636 | 1.00 | 36.83 | | C |
| ATOM | 5179 | CG | ASN | 649 | 83.548 | 25.704 | −25.520 | 1.00 | 36.83 | | C |
| ATOM | 5180 | OD1 | ASN | 649 | 83.184 | 24.555 | −25.753 | 1.00 | 36.83 | | O |
| ATOM | 5181 | ND2 | ASN | 649 | 83.529 | 26.225 | −24.303 | 1.00 | 36.83 | | N |
| ATOM | 5182 | C | ASN | 649 | 81.863 | 27.590 | −27.197 | 1.00 | 36.83 | | C |
| ATOM | 5183 | O | ASN | 649 | 82.065 | 28.692 | −26.680 | 1.00 | 36.83 | | O |
| ATOM | 5184 | N | PRO | 650 | 80.634 | 27.062 | −27.331 | 1.00 | 36.83 | | N |
| ATOM | 5185 | CD | PRO | 650 | 80.332 | 26.001 | −28.314 | 1.00 | 36.83 | | C |
| ATOM | 5186 | CA | PRO | 650 | 79.397 | 27.713 | −26.873 | 1.00 | 36.83 | | C |
| ATOM | 5187 | CB | PRO | 650 | 78.370 | 27.198 | −27.878 | 1.00 | 36.83 | | C |
| ATOM | 5188 | CG | PRO | 650 | 78.845 | 25.793 | −28.132 | 1.00 | 36.83 | | C |
| ATOM | 5189 | C | PRO | 650 | 78.885 | 27.591 | −25.427 | 1.00 | 36.83 | | C |
| ATOM | 5190 | O | PRO | 650 | 78.947 | 26.534 | −24.803 | 1.00 | 36.83 | | O |
| ATOM | 5191 | N | HIS | 651 | 78.355 | 28.694 | −24.910 | 1.00 | 36.83 | | N |
| ATOM | 5192 | CA | HIS | 651 | 77.771 | 28.724 | −23.571 | 1.00 | 36.83 | | C |
| ATOM | 5193 | CB | HIS | 651 | 78.491 | 29.731 | −22.672 | 1.00 | 36.83 | | C |
| ATOM | 5194 | CG | HIS | 651 | 79.940 | 29.418 | −22.467 | 1.00 | 36.83 | | C |
| ATOM | 5195 | CD2 | HIS | 651 | 80.549 | 28.569 | −21.611 | 1.00 | 36.83 | | C |
| ATOM | 5196 | ND1 | HIS | 651 | 80.935 | 29.937 | −23.270 | 1.00 | 36.83 | | N |
| ATOM | 5197 | CE1 | HIS | 651 | 82.094 | 29.415 | −22.918 | 1.00 | 36.83 | | C |
| ATOM | 5198 | NE2 | HIS | 651 | 81.889 | 28.581 | −21.915 | 1.00 | 36.83 | | N |
| ATOM | 5199 | C | HIS | 651 | 76.311 | 29.135 | −23.763 | 1.00 | 36.83 | | C |
| ATOM | 5200 | O | HIS | 651 | 76.016 | 30.173 | −24.369 | 1.00 | 36.83 | | O |
| ATOM | 5201 | N | PHE | 652 | 75.398 | 28.318 | −23.255 | 1.00 | 36.83 | | N |
| ATOM | 5202 | CA | PHE | 652 | 73.982 | 28.591 | −23.424 | 1.00 | 36.83 | | C |
| ATOM | 5203 | CB | PHE | 652 | 73.261 | 27.298 | −23.795 | 1.00 | 36.83 | | C |
| ATOM | 5204 | CG | PHE | 652 | 73.560 | 26.821 | −25.180 | 1.00 | 36.83 | | C |
| ATOM | 5205 | CD1 | PHE | 652 | 72.958 | 27.411 | −26.269 | 1.00 | 36.83 | | C |
| ATOM | 5206 | CD2 | PHE | 652 | 74.478 | 25.804 | −25.396 | 1.00 | 36.83 | | C |
| ATOM | 5207 | CE1 | PHE | 652 | 73.259 | 27.008 | −27.555 | 1.00 | 36.83 | | C |
| ATOM | 5208 | CE2 | PHE | 652 | 74.789 | 25.395 | −26.684 | 1.00 | 36.83 | | C |
| ATOM | 5209 | CZ | PHE | 652 | 74.173 | 26.003 | −27.771 | 1.00 | 36.83 | | C |
| ATOM | 5210 | C | PHE | 652 | 73.266 | 29.234 | −22.253 | 1.00 | 36.83 | | C |
| ATOM | 5211 | O | PHE | 652 | 73.401 | 28.793 | −21.119 | 1.00 | 36.83 | | O |
| ATOM | 5212 | N | VAL | 653 | 72.504 | 30.282 | −22.554 | 1.00 | 36.83 | | N |
| ATOM | 5213 | CA | VAL | 653 | 71.684 | 30.986 | −21.576 | 1.00 | 36.83 | | C |
| ATOM | 5214 | CB | VAL | 653 | 72.099 | 32.470 | −21.435 | 1.00 | 36.83 | | C |
| ATOM | 5215 | CG1 | VAL | 653 | 71.205 | 33.153 | −20.418 | 1.00 | 36.83 | | C |
| ATOM | 5216 | CG2 | VAL | 653 | 73.547 | 32.572 | −20.987 | 1.00 | 36.83 | | C |
| ATOM | 5217 | C | VAL | 653 | 70.218 | 30.931 | −22.062 | 1.00 | 36.83 | | C |
| ATOM | 5218 | O | VAL | 653 | 69.871 | 31.526 | −23.085 | 1.00 | 36.83 | | O |
| ATOM | 5219 | N | ARG | 654 | 69.366 | 30.203 | −21.348 | 1.00 | 36.83 | | N |
| ATOM | 5220 | CA | ARG | 654 | 67.954 | 30.106 | −21.738 | 1.00 | 36.83 | | C |
| ATOM | 5221 | CB | ARG | 654 | 67.434 | 28.667 | −21.577 | 1.00 | 36.83 | | C |
| ATOM | 5222 | CG | ARG | 654 | 68.425 | 27.546 | −21.898 | 1.00 | 36.83 | | C |
| ATOM | 5223 | CD | ARG | 654 | 69.069 | 27.687 | −23.261 | 1.00 | 36.83 | | C |
| ATOM | 5224 | NE | ARG | 654 | 68.124 | 27.696 | −24.382 | 1.00 | 36.83 | | N |
| ATOM | 5225 | CZ | ARG | 654 | 67.530 | 26.622 | −24.900 | 1.00 | 36.83 | | C |
| ATOM | 5226 | NH1 | ARG | 654 | 67.761 | 25.414 | −24.405 | 1.00 | 36.83 | | N |
| ATOM | 5227 | NH2 | ARG | 654 | 66.719 | 26.758 | −25.943 | 1.00 | 36.83 | | N |
| ATOM | 5228 | C | ARG | 654 | 67.077 | 31.062 | −20.891 | 1.00 | 36.83 | | C |
| ATOM | 5229 | O | ARG | 654 | 66.944 | 30.901 | −19.677 | 1.00 | 36.83 | | O |
| ATOM | 5230 | N | CYS | 655 | 66.513 | 32.073 | −21.536 | 1.00 | 36.83 | | N |
| ATOM | 5231 | CA | CYS | 655 | 65.649 | 33.012 | −20.838 | 1.00 | 36.83 | | C |
| ATOM | 5232 | CB | CYS | 655 | 65.739 | 34.408 | −21.461 | 1.00 | 36.83 | | C |
| ATOM | 5233 | SG | CYS | 655 | 67.373 | 35.187 | −21.323 | 1.00 | 36.83 | | S |
| ATOM | 5234 | C | CYS | 655 | 64.228 | 32.479 | −20.940 | 1.00 | 36.83 | | C |
| ATOM | 5235 | O | CYS | 655 | 63.822 | 31.973 | −21.977 | 1.00 | 36.83 | | O |
| ATOM | 5236 | N | ILE | 656 | 63.487 | 32.571 | −19.850 | 1.00 | 36.83 | | N |
| ATOM | 5237 | CA | ILE | 656 | 62.124 | 32.091 | −19.828 | 1.00 | 36.83 | | C |
| ATOM | 5238 | CB | ILE | 656 | 61.935 | 30.977 | −18.790 | 1.00 | 36.83 | | C |
| ATOM | 5239 | CG2 | ILE | 656 | 60.513 | 30.443 | −18.864 | 1.00 | 36.83 | | C |
| ATOM | 5240 | CG1 | ILE | 656 | 62.960 | 29.860 | −19.013 | 1.00 | 36.83 | | C |
| ATOM | 5241 | CD1 | ILE | 656 | 62.791 | 29.085 | −20.308 | 1.00 | 36.83 | | C |
| ATOM | 5242 | C | ILE | 656 | 61.243 | 33.257 | −19.435 | 1.00 | 36.83 | | C |
| ATOM | 5243 | O | ILE | 656 | 61.513 | 33.932 | −18.437 | 1.00 | 36.83 | | O |
| ATOM | 5244 | N | ILE | 657 | 60.205 | 33.508 | −20.230 | 1.00 | 36.83 | | N |
| ATOM | 5245 | CA | ILE | 657 | 59.281 | 34.592 | −19.926 | 1.00 | 36.83 | | C |
| ATOM | 5246 | CB | ILE | 657 | 58.584 | 35.118 | −21.217 | 1.00 | 36.83 | | C |
| ATOM | 5247 | CG2 | ILE | 657 | 57.409 | 34.228 | −21.594 | 1.00 | 36.83 | | C |
| ATOM | 5248 | CG1 | ILE | 657 | 58.148 | 36.564 | −21.007 | 1.00 | 36.83 | | C |
| ATOM | 5249 | CD1 | ILE | 657 | 57.657 | 37.241 | −22.246 | 1.00 | 36.83 | | C |
| ATOM | 5250 | C | ILE | 657 | 58.276 | 34.009 | −18.930 | 1.00 | 36.83 | | C |
| ATOM | 5251 | O | ILE | 657 | 57.715 | 32.944 | −19.153 | 1.00 | 36.83 | | O |
| ATOM | 5252 | N | PRO | 658 | 58.065 | 34.694 | −17.799 | 1.00 | 36.83 | | N |
| ATOM | 5253 | CD | PRO | 658 | 58.733 | 35.943 | −17.398 | 1.00 | 36.83 | | C |
| ATOM | 5254 | CA | PRO | 658 | 57.141 | 34.249 | −16.749 | 1.00 | 36.83 | | C |
| ATOM | 5255 | CB | PRO | 658 | 57.430 | 35.223 | −15.609 | 1.00 | 36.83 | | C |
| ATOM | 5256 | CG | PRO | 658 | 57.812 | 36.462 | −16.320 | 1.00 | 36.83 | | C |
| ATOM | 5257 | C | PRO | 658 | 55.669 | 34.206 | −17.126 | 1.00 | 36.83 | | C |
| ATOM | 5258 | O | PRO | 658 | 54.920 | 33.372 | −16.618 | 1.00 | 36.83 | | O |
| ATOM | 5259 | N | ASN | 659 | 55.256 | 35.103 | −18.011 | 1.00 | 36.83 | | N |
| ATOM | 5260 | CA | ASN | 659 | 53.867 | 35.160 | −18.459 | 1.00 | 36.83 | | C |
| ATOM | 5261 | CB | ASN | 659 | 52.997 | 35.798 | −17.380 | 1.00 | 36.83 | | C |
| ATOM | 5262 | CG | ASN | 659 | 53.541 | 37.126 | −16.912 | 1.00 | 36.83 | | C |
| ATOM | 5263 | OD1 | ASN | 659 | 53.585 | 38.101 | −17.668 | 1.00 | 36.83 | | O |
| ATOM | 5264 | ND2 | ASN | 659 | 53.974 | 37.172 | −15.668 | 1.00 | 36.83 | | N |
| ATOM | 5265 | C | ASN | 659 | 53.796 | 35.969 | −19.740 | 1.00 | 36.83 | | C |
| ATOM | 5266 | O | ASN | 659 | 54.820 | 36.312 | −20.302 | 1.00 | 36.83 | | O |
| ATOM | 5267 | N | ASN | 660 | 52.594 | 36.266 | −20.212 | 1.00 | 36.83 | | N |
| ATOM | 5268 | CA | ASN | 660 | 52.458 | 37.045 | −21.439 | 1.00 | 36.83 | | C |
| ATOM | 5269 | CB | ASN | 660 | 51.603 | 36.281 | −22.464 | 1.00 | 36.83 | | C |
| ATOM | 5270 | CG | ASN | 660 | 52.111 | 34.864 | −22.716 | 1.00 | 36.83 | | C |
| ATOM | 5271 | OD1 | ASN | 660 | 51.419 | 33.886 | −22.433 | 1.00 | 36.83 | | O |
| ATOM | 5272 | ND2 | ASN | 660 | 53.326 | 34.748 | −23.243 | 1.00 | 36.83 | | N |
| ATOM | 5273 | C | ASN | 660 | 51.855 | 38.430 | −21.169 | 1.00 | 36.83 | | C |
| ATOM | 5274 | O | ASN | 660 | 51.295 | 39.050 | −22.063 | 1.00 | 36.83 | | O |
| ATOM | 5275 | N | LYS | 661 | 51.976 | 38.909 | −19.934 | 1.00 | 36.83 | | N |
| ATOM | 5276 | CA | LYS | 661 | 51.449 | 40.224 | −19.564 | 1.00 | 36.83 | | C |
| ATOM | 5277 | CB | LYS | 661 | 50.451 | 40.096 | −18.404 | 1.00 | 36.83 | | C |
| ATOM | 5278 | CG | LYS | 661 | 48.995 | 39.952 | −18.806 | 1.00 | 36.83 | | C |
| ATOM | 5279 | CD | LYS | 661 | 48.514 | 38.512 | −18.806 | 1.00 | 36.83 | | C |
| ATOM | 5280 | CE | LYS | 661 | 48.345 | 37.966 | −17.386 | 1.00 | 36.83 | | C |
| ATOM | 5281 | NZ | LYS | 661 | 47.753 | 36.585 | −17.382 | 1.00 | 36.83 | | N |
| ATOM | 5282 | C | LYS | 661 | 52.553 | 41.216 | −19.157 | 1.00 | 36.83 | | C |
| ATOM | 5283 | O | LYS | 661 | 52.268 | 42.348 | −18.779 | 1.00 | 36.83 | | O |
| ATOM | 5284 | N | GLN | 662 | 53.809 | 40.795 | −19.240 | 1.00 | 36.83 | | N |
| ATOM | 5285 | CA | GLN | 662 | 54.919 | 41.654 | −18.855 | 1.00 | 36.83 | | C |
| ATOM | 5286 | CB | GLN | 662 | 55.024 | 42.865 | −19.806 | 1.00 | 36.83 | | C |
| ATOM | 5287 | CG | GLN | 662 | 55.774 | 42.538 | −21.109 | 1.00 | 36.83 | | C |
| ATOM | 5288 | CD | GLN | 662 | 55.814 | 43.686 | −22.125 | 1.00 | 36.83 | | C |
| ATOM | 5289 | OE1 | GLN | 662 | 54.868 | 43.893 | −22.880 | 1.00 | 36.83 | | O |
| ATOM | 5290 | NE2 | GLN | 662 | 56.928 | 44.432 | −22.143 | 1.00 | 36.83 | | N |
| ATOM | 5291 | C | GLN | 662 | 54.736 | 42.103 | −17.411 | 1.00 | 36.83 | | C |
| ATOM | 5292 | O | GLN | 662 | 54.988 | 43.250 | −17.064 | 1.00 | 36.83 | | O |
| ATOM | 5293 | N | LEU | 663 | 54.304 | 41.170 | −16.569 | 1.00 | 36.83 | | N |
| ATOM | 5294 | CA | LEU | 663 | 54.079 | 41.442 | −15.155 | 1.00 | 36.83 | | C |
| ATOM | 5295 | CB | LEU | 663 | 52.629 | 41.125 | −14.776 | 1.00 | 36.83 | | C |
| ATOM | 5296 | CG | LEU | 663 | 51.495 | 41.882 | −15.466 | 1.00 | 36.83 | | C |
| ATOM | 5297 | CD1 | LEU | 663 | 50.146 | 41.280 | −15.052 | 1.00 | 36.83 | | C |
| ATOM | 5298 | CD2 | LEU | 663 | 51.585 | 43.362 | −15.108 | 1.00 | 36.83 | | C |
| ATOM | 5299 | C | LEU | 663 | 55.004 | 40.636 | −14.234 | 1.00 | 36.83 | | C |
| ATOM | 5300 | O | LEU | 663 | 55.354 | 39.497 | −14.524 | 1.00 | 36.83 | | O |
| ATOM | 5301 | N | PRO | 664 | 55.403 | 41.238 | −13.107 | 1.00 | 36.83 | | N |
| ATOM | 5302 | CD | PRO | 664 | 55.249 | 42.683 | −12.848 | 1.00 | 36.83 | | C |
| ATOM | 5303 | CA | PRO | 664 | 56.277 | 40.628 | −12.101 | 1.00 | 36.83 | | C |
| ATOM | 5304 | CB | PRO | 664 | 56.859 | 41.838 | −11.376 | 1.00 | 36.83 | | C |
| ATOM | 5305 | CG | PRO | 664 | 55.748 | 42.816 | −11.415 | 1.00 | 36.83 | | C |
| ATOM | 5306 | C | PRO | 664 | 55.494 | 39.723 | −11.158 | 1.00 | 36.83 | | C |
| ATOM | 5307 | O | PRO | 664 | 54.269 | 39.787 | −11.108 | 1.00 | 36.83 | | O |
| ATOM | 5308 | N | ALA | 665 | 56.199 | 38.876 | −10.420 | 1.00 | 36.83 | | N |
| ATOM | 5309 | CA | ALA | 665 | 55.550 | 37.980 | −9.459 | 1.00 | 36.83 | | C |
| ATOM | 5310 | CB | ALA | 665 | 55.192 | 38.764 | −8.200 | 1.00 | 36.83 | | C |
| ATOM | 5311 | C | ALA | 665 | 54.296 | 37.268 | −9.993 | 1.00 | 36.83 | | C |
| ATOM | 5312 | O | ALA | 665 | 53.296 | 37.176 | −9.294 | 1.00 | 36.83 | | O |
| ATOM | 5313 | N | LYS | 666 | 54.349 | 36.770 | −11.225 | 1.00 | 36.83 | | N |
| ATOM | 5314 | CA | LYS | 666 | 53.214 | 36.075 | −11.798 | 1.00 | 36.83 | | C |
| ATOM | 5315 | CB | LYS | 666 | 52.312 | 37.057 | −12.524 | 1.00 | 36.83 | | C |
| ATOM | 5316 | CG | LYS | 666 | 50.917 | 36.528 | −12.766 | 1.00 | 36.83 | | C |
| ATOM | 5317 | CD | LYS | 666 | 50.018 | 37.598 | −13.375 | 1.00 | 36.83 | | C |
| ATOM | 5318 | CE | LYS | 666 | 48.603 | 37.054 | −13.582 | 1.00 | 36.83 | | C |
| ATOM | 5319 | NZ | LYS | 666 | 47.790 | 37.905 | −14.500 | 1.00 | 36.83 | | N |
| ATOM | 5320 | C | LYS | 666 | 53.686 | 34.974 | −12.744 | 1.00 | 36.83 | | C |
| ATOM | 5321 | O | LYS | 666 | 53.463 | 35.017 | −13.953 | 1.00 | 36.83 | | O |
| ATOM | 5322 | N | LEU | 667 | 54.335 | 33.978 | −12.149 | 1.00 | 36.83 | | N |
| ATOM | 5323 | CA | LEU | 667 | 54.892 | 32.828 | −12.844 | 1.00 | 36.83 | | C |
| ATOM | 5324 | CB | LEU | 667 | 55.888 | 32.125 | −11.919 | 1.00 | 36.83 | | C |
| ATOM | 5325 | CG | LEU | 667 | 56.791 | 31.066 | −12.535 | 1.00 | 36.83 | | C |
| ATOM | 5326 | CD1 | LEU | 667 | 57.767 | 31.749 | −13.484 | 1.00 | 36.83 | | C |
| ATOM | 5327 | CD2 | LEU | 667 | 57.517 | 30.312 | −11.439 | 1.00 | 36.83 | | C |
| ATOM | 5328 | C | LEU | 667 | 53.791 | 31.859 | −13.226 | 1.00 | 36.83 | | C |
| ATOM | 5329 | O | LEU | 667 | 53.402 | 31.042 | −12.405 | 1.00 | 36.83 | | O |
| ATOM | 5330 | N | GLU | 668 | 53.305 | 31.941 | −14.466 | 1.00 | 36.83 | | N |
| ATOM | 5331 | CA | GLU | 668 | 52.221 | 31.067 | −14.948 | 1.00 | 36.83 | | C |
| ATOM | 5332 | CB | GLU | 668 | 51.423 | 31.761 | −16.057 | 1.00 | 36.83 | | C |
| ATOM | 5333 | CG | GLU | 668 | 50.744 | 33.044 | −15.606 | 1.00 | 36.83 | | C |
| ATOM | 5334 | CD | GLU | 668 | 50.123 | 33.820 | −16.761 | 1.00 | 36.83 | | C |
| ATOM | 5335 | OE1 | GLU | 668 | 50.789 | 33.983 | −17.811 | 1.00 | 36.83 | | O |
| ATOM | 5336 | OE2 | GLU | 668 | 48.969 | 34.281 | −16.615 | 1.00 | 36.83 | | O |
| ATOM | 5337 | C | GLU | 668 | 52.784 | 29.749 | −15.468 | 1.00 | 36.83 | | C |
| ATOM | 5338 | O | GLU | 668 | 53.517 | 29.720 | −16.457 | 1.00 | 36.83 | | O |
| ATOM | 5339 | N | ASP | 669 | 52.419 | 28.661 | −14.801 | 1.00 | 36.83 | | N |
| ATOM | 5340 | CA | ASP | 669 | 52.930 | 27.346 | −15.154 | 1.00 | 36.83 | | C |
| ATOM | 5341 | CB | ASP | 669 | 52.400 | 26.313 | −14.156 | 1.00 | 36.83 | | C |
| ATOM | 5342 | CG | ASP | 669 | 50.913 | 26.417 | −13.949 | 1.00 | 36.83 | | C |
| ATOM | 5343 | OD1 | ASP | 669 | 50.187 | 26.470 | −14.967 | 1.00 | 36.83 | | O |
| ATOM | 5344 | OD2 | ASP | 669 | 50.470 | 26.438 | −12.774 | 1.00 | 36.83 | | O |
| ATOM | 5345 | C | ASP | 669 | 52.737 | 26.853 | −16.599 | 1.00 | 36.83 | | C |
| ATOM | 5346 | O | ASP | 669 | 53.645 | 26.269 | −17.181 | 1.00 | 36.83 | | O |
| ATOM | 5347 | N | LYS | 670 | 51.576 | 27.080 | −17.190 | 1.00 | 36.83 | | N |
| ATOM | 5348 | CA | LYS | 670 | 51.369 | 26.613 | −18.561 | 1.00 | 36.83 | | C |
| ATOM | 5349 | CB | LYS | 670 | 49.923 | 26.874 | −18.984 | 1.00 | 36.83 | | C |
| ATOM | 5350 | CG | LYS | 670 | 49.311 | 25.782 | −19.843 | 1.00 | 36.83 | | C |
| ATOM | 5351 | CD | LYS | 670 | 50.100 | 25.541 | −21.126 | 1.00 | 36.83 | | C |
| ATOM | 5352 | CE | LYS | 670 | 49.499 | 24.389 | −21.910 | 1.00 | 36.83 | | C |
| ATOM | 5353 | NZ | LYS | 670 | 49.198 | 23.231 | −20.994 | 1.00 | 36.83 | | N |
| ATOM | 5354 | C | LYS | 670 | 52.359 | 27.329 | −19.514 | 1.00 | 36.83 | | C |
| ATOM | 5355 | O | LYS | 670 | 52.942 | 26.710 | −20.413 | 1.00 | 36.83 | | O |
| ATOM | 5356 | N | VAL | 671 | 52.543 | 28.629 | −19.304 | 1.00 | 36.83 | | N |
| ATOM | 5357 | CA | VAL | 671 | 53.463 | 29.410 | −20.121 | 1.00 | 36.83 | | C |
| ATOM | 5358 | CB | VAL | 671 | 53.372 | 30.915 | −19.790 | 1.00 | 36.83 | | C |
| ATOM | 5359 | CG1 | VAL | 671 | 54.378 | 31.698 | −20.632 | 1.00 | 36.83 | | C |
| ATOM | 5360 | CG2 | VAL | 671 | 51.967 | 31.416 | −20.048 | 1.00 | 36.83 | | C |
| ATOM | 5361 | C | VAL | 671 | 54.919 | 28.966 | −19.939 | 1.00 | 36.83 | | C |
| ATOM | 5362 | O | VAL | 671 | 55.648 | 28.828 | −20.910 | 1.00 | 36.83 | | O |
| ATOM | 5363 | N | VAL | 672 | 55.326 | 28.733 | −18.694 | 1.00 | 36.83 | | N |
| ATOM | 5364 | CA | VAL | 672 | 56.696 | 28.317 | −18.390 | 1.00 | 36.83 | | C |
| ATOM | 5365 | CB | VAL | 672 | 56.985 | 28.418 | −16.853 | 1.00 | 36.83 | | C |
| ATOM | 5366 | CG1 | VAL | 672 | 58.328 | 27.817 | −16.522 | 1.00 | 36.83 | | C |
| ATOM | 5367 | CG2 | VAL | 672 | 56.964 | 29.881 | −16.417 | 1.00 | 36.83 | | C |
| ATOM | 5368 | C | VAL | 672 | 57.010 | 26.900 | −18.877 | 1.00 | 36.83 | | C |
| ATOM | 5369 | O | VAL | 672 | 58.064 | 26.659 | −19.464 | 1.00 | 36.83 | | O |
| ATOM | 5370 | N | LEU | 673 | 56.085 | 25.976 | −18.625 | 1.00 | 36.83 | | N |
| ATOM | 5371 | CA | LEU | 673 | 56.243 | 24.581 | −19.021 | 1.00 | 36.83 | | C |
| ATOM | 5372 | CB | LEU | 673 | 55.022 | 23.765 | −18.554 | 1.00 | 36.83 | | C |
| ATOM | 5373 | CG | LEU | 673 | 55.227 | 22.646 | −17.523 | 1.00 | 36.83 | | C |
| ATOM | 5374 | CD1 | LEU | 673 | 56.575 | 22.766 | −16.821 | 1.00 | 36.83 | | C |
| ATOM | 5375 | CD2 | LEU | 673 | 54.096 | 22.695 | −16.494 | 1.00 | 36.83 | | C |
| ATOM | 5376 | C | LEU | 673 | 56.447 | 24.453 | −20.537 | 1.00 | 36.83 | | C |
| ATOM | 5377 | O | LEU | 673 | 57.384 | 23.779 | −20.976 | 1.00 | 36.83 | | O |
| ATOM | 5378 | N | ASP | 674 | 55.591 | 25.102 | −21.328 | 1.00 | 36.83 | | N |
| ATOM | 5379 | CA | ASP | 674 | 55.718 | 25.072 | −22.788 | 1.00 | 36.83 | | C |
| ATOM | 5380 | CB | ASP | 674 | 54.823 | 26.118 | −23.471 | 1.00 | 36.83 | | C |
| ATOM | 5381 | CG | ASP | 674 | 53.357 | 25.737 | −23.503 | 1.00 | 36.83 | | C |
| ATOM | 5382 | OD1 | ASP | 674 | 53.034 | 24.564 | −23.765 | 1.00 | 36.83 | | O |
| ATOM | 5383 | OD2 | ASP | 674 | 52.522 | 26.641 | −23.290 | 1.00 | 36.83 | | O |
| ATOM | 5384 | C | ASP | 674 | 57.153 | 25.419 | −23.165 | 1.00 | 36.83 | | C |
| ATOM | 5385 | O | ASP | 674 | 57.738 | 24.793 | −24.035 | 1.00 | 36.83 | | O |
| ATOM | 5386 | N | GLN | 675 | 57.702 | 26.447 | −22.529 | 1.00 | 36.83 | | N |
| ATOM | 5387 | CA | GLN | 675 | 59.066 | 26.863 | −22.824 | 1.00 | 36.83 | | C |
| ATOM | 5388 | CB | GLN | 675 | 59.374 | 28.208 | −22.154 | 1.00 | 36.83 | | C |
| ATOM | 5389 | CG | GLN | 675 | 58.500 | 29.341 | −22.646 | 1.00 | 36.83 | | C |
| ATOM | 5390 | CD | GLN | 675 | 58.773 | 30.661 | −21.932 | 1.00 | 36.83 | | C |
| ATOM | 5391 | OE1 | GLN | 675 | 59.712 | 31.388 | −22.273 | 1.00 | 36.83 | | O |
| ATOM | 5392 | NE2 | GLN | 675 | 57.957 | 30.966 | −20.929 | 1.00 | 36.83 | | N |
| ATOM | 5393 | C | GLN | 675 | 60.069 | 25.800 | −22.383 | 1.00 | 36.83 | | C |
| ATOM | 5394 | O | GLN | 675 | 60.947 | 25.425 | −23.146 | 1.00 | 36.83 | | O |
| ATOM | 5395 | N | LEU | 676 | 59.922 | 25.297 | −21.161 | 1.00 | 36.83 | | N |
| ATOM | 5396 | CA | LEU | 676 | 60.840 | 24.276 | −20.676 | 1.00 | 36.83 | | C |
| ATOM | 5397 | CB | LEU | 676 | 60.472 | 23.826 | −19.264 | 1.00 | 36.83 | | C |
| ATOM | 5398 | CG | LEU | 676 | 60.548 | 24.915 | −18.200 | 1.00 | 36.83 | | C |
| ATOM | 5399 | CD1 | LEU | 676 | 60.348 | 24.269 | −16.854 | 1.00 | 36.83 | | C |
| ATOM | 5400 | CD2 | LEU | 676 | 61.872 | 25.659 | −18.274 | 1.00 | 36.83 | | C |
| ATOM | 5401 | C | LEU | 676 | 60.820 | 23.090 | −21.618 | 1.00 | 36.83 | | C |
| ATOM | 5402 | O | LEU | 676 | 61.867 | 22.524 | −21.930 | 1.00 | 36.83 | | O |
| ATOM | 5403 | N | ARG | 677 | 59.626 | 22.719 | −22.076 | 1.00 | 36.83 | | N |
| ATOM | 5404 | CA | ARG | 677 | 59.519 | 21.604 | −22.998 | 1.00 | 36.83 | | C |
| ATOM | 5405 | CB | ARG | 677 | 58.052 | 21.229 | −23.250 | 1.00 | 36.83 | | C |
| ATOM | 5406 | CG | ARG | 677 | 57.426 | 20.408 | −22.116 | 1.00 | 36.83 | | C |
| ATOM | 5407 | CD | ARG | 677 | 56.065 | 19.831 | −22.489 | 1.00 | 36.83 | | C |
| ATOM | 5408 | NE | ARG | 677 | 55.028 | 20.852 | −22.620 | 1.00 | 36.83 | | N |
| ATOM | 5409 | CZ | ARG | 677 | 54.283 | 21.318 | −21.624 | 1.00 | 36.83 | | C |
| ATOM | 5410 | NH1 | ARG | 677 | 54.436 | 20.857 | −20.403 | 1.00 | 36.83 | | N |
| ATOM | 5411 | NH2 | ARG | 677 | 53.391 | 22.266 | −21.854 | 1.00 | 36.83 | | N |
| ATOM | 5412 | C | ARG | 677 | 60.221 | 21.882 | −24.324 | 1.00 | 36.83 | | C |
| ATOM | 5413 | O | ARG | 677 | 61.215 | 21.232 | −24.642 | 1.00 | 36.83 | | O |
| ATOM | 5414 | N | CYS | 678 | 59.753 | 22.865 | −25.086 | 1.00 | 36.83 | | N |
| ATOM | 5415 | CA | CYS | 678 | 60.376 | 23.097 | −26.377 | 1.00 | 36.83 | | C |
| ATOM | 5416 | CB | CYS | 678 | 59.535 | 24.077 | −27.205 | 1.00 | 36.83 | | C |
| ATOM | 5417 | SG | CYS | 678 | 59.769 | 25.815 | −26.898 | 1.00 | 36.83 | | S |
| ATOM | 5418 | C | CYS | 678 | 61.857 | 23.506 | −26.345 | 1.00 | 36.83 | | C |
| ATOM | 5419 | O | CYS | 678 | 62.570 | 23.297 | −27.325 | 1.00 | 36.83 | | O |
| ATOM | 5420 | N | ASN | 679 | 62.330 | 24.056 | −25.228 | 1.00 | 36.83 | | N |
| ATOM | 5421 | CA | ASN | 679 | 63.746 | 24.440 | −25.124 | 1.00 | 36.83 | | C |
| ATOM | 5422 | CB | ASN | 679 | 63.992 | 25.401 | −23.946 | 1.00 | 36.83 | | C |
| ATOM | 5423 | CG | ASN | 679 | 63.562 | 26.832 | −24.233 | 1.00 | 36.83 | | C |
| ATOM | 5424 | OD1 | ASN | 679 | 63.771 | 27.716 | −23.404 | 1.00 | 36.83 | | O |
| ATOM | 5425 | ND2 | ASN | 679 | 62.969 | 27.068 | −25.397 | 1.00 | 36.83 | | N |
| ATOM | 5426 | C | ASN | 679 | 64.595 | 23.187 | −24.895 | 1.00 | 36.83 | | C |
| ATOM | 5427 | O | ASN | 679 | 65.814 | 23.202 | −25.102 | 1.00 | 36.83 | | O |
| ATOM | 5428 | N | GLY | 680 | 63.944 | 22.118 | −24.446 | 1.00 | 36.83 | | N |
| ATOM | 5429 | CA | GLY | 680 | 64.638 | 20.872 | −24.172 | 1.00 | 36.83 | | C |
| ATOM | 5430 | C | GLY | 680 | 65.510 | 20.972 | −22.922 | 1.00 | 36.83 | | C |
| ATOM | 5431 | O | GLY | 680 | 66.608 | 20.415 | −22.878 | 1.00 | 36.83 | | O |
| ATOM | 5432 | N | VAL | 681 | 65.022 | 21.688 | −21.912 | 1.00 | 36.83 | | N |
| ATOM | 5433 | CA | VAL | 681 | 65.753 | 21.872 | −20.667 | 1.00 | 36.83 | | C |
| ATOM | 5434 | CB | VAL | 681 | 65.070 | 22.918 | −19.762 | 1.00 | 36.83 | | C |
| ATOM | 5435 | CG1 | VAL | 681 | 65.643 | 22.859 | −18.357 | 1.00 | 36.83 | | C |
| ATOM | 5436 | CG2 | VAL | 681 | 65.278 | 24.294 | −20.341 | 1.00 | 36.83 | | C |
| ATOM | 5437 | C | VAL | 681 | 65.886 | 20.582 | −19.886 | 1.00 | 36.83 | | C |
| ATOM | 5438 | O | VAL | 681 | 66.974 | 20.246 | −19.419 | 1.00 | 36.83 | | O |
| ATOM | 5439 | N | LEU | 682 | 64.783 | 19.860 | −19.745 | 1.00 | 36.83 | | N |
| ATOM | 5440 | CA | LEU | 682 | 64.802 | 18.609 | −19.013 | 1.00 | 36.83 | | C |
| ATOM | 5441 | CB | LEU | 682 | 63.392 | 18.033 | −18.877 | 1.00 | 36.83 | | C |
| ATOM | 5442 | CG | LEU | 682 | 62.577 | 18.740 | −17.795 | 1.00 | 36.83 | | C |
| ATOM | 5443 | CD1 | LEU | 682 | 62.096 | 20.062 | −18.322 | 1.00 | 36.83 | | C |
| ATOM | 5444 | CD2 | LEU | 682 | 61.408 | 17.878 | −17.373 | 1.00 | 36.83 | | C |
| ATOM | 5445 | C | LEU | 682 | 65.736 | 17.586 | −19.634 | 1.00 | 36.83 | | C |
| ATOM | 5446 | O | LEU | 682 | 66.454 | 16.901 | −18.911 | 1.00 | 36.83 | | O |
| ATOM | 5447 | N | GLU | 683 | 65.736 | 17.486 | −20.962 | 1.00 | 36.83 | | N |
| ATOM | 5448 | CA | GLU | 683 | 66.622 | 16.546 | −21.635 | 1.00 | 36.83 | | C |
| ATOM | 5449 | CB | GLU | 683 | 66.277 | 16.414 | −23.123 | 1.00 | 36.83 | | C |
| ATOM | 5450 | CG | GLU | 683 | 64.900 | 15.823 | −23.433 | 1.00 | 36.83 | | C |
| ATOM | 5451 | CD | GLU | 683 | 63.805 | 16.877 | −23.474 | 1.00 | 36.83 | | C |
| ATOM | 5452 | OE1 | GLU | 683 | 62.659 | 16.531 | −23.827 | 1.00 | 36.83 | | O |
| ATOM | 5453 | OE2 | GLU | 683 | 64.086 | 18.053 | −23.153 | 1.00 | 36.83 | | O |
| ATOM | 5454 | C | GLU | 683 | 68.041 | 17.087 | −21.482 | 1.00 | 36.83 | | C |
| ATOM | 5455 | O | GLU | 683 | 69.014 | 16.331 | −21.398 | 1.00 | 36.83 | | O |
| ATOM | 5456 | N | GLY | 684 | 68.142 | 18.411 | −21.441 | 1.00 | 36.83 | | N |
| ATOM | 5457 | CA | GLY | 684 | 69.431 | 19.053 | −21.275 | 1.00 | 36.83 | | C |
| ATOM | 5458 | C | GLY | 684 | 70.026 | 18.691 | −19.928 | 1.00 | 36.83 | | C |
| ATOM | 5459 | O | GLY | 684 | 71.249 | 18.679 | −19.771 | 1.00 | 36.83 | | O |
| ATOM | 5460 | N | ILE | 685 | 69.164 | 18.383 | −18.962 | 1.00 | 36.83 | | N |
| ATOM | 5461 | CA | ILE | 685 | 69.616 | 18.008 | −17.631 | 1.00 | 36.83 | | C |
| ATOM | 5462 | CB | ILE | 685 | 68.553 | 18.287 | −16.560 | 1.00 | 36.83 | | C |
| ATOM | 5463 | CG2 | ILE | 685 | 69.123 | 17.976 | −15.184 | 1.00 | 36.83 | | C |
| ATOM | 5464 | CG1 | ILE | 685 | 68.101 | 19.744 | −16.627 | 1.00 | 36.83 | | C |
| ATOM | 5465 | CD1 | ILE | 685 | 66.844 | 20.011 | −15.839 | 1.00 | 36.83 | | C |
| ATOM | 5466 | C | ILE | 685 | 69.934 | 16.523 | −17.586 | 1.00 | 36.83 | | C |
| ATOM | 5467 | O | ILE | 685 | 70.933 | 16.117 | −16.994 | 1.00 | 36.83 | | O |
| ATOM | 5468 | N | ARG | 686 | 69.090 | 15.713 | −18.218 | 1.00 | 36.83 | | N |
| ATOM | 5469 | CA | ARG | 686 | 69.310 | 14.272 | −18.233 | 1.00 | 36.83 | | C |
| ATOM | 5470 | CB | ARG | 686 | 68.146 | 13.538 | −18.921 | 1.00 | 36.83 | | C |
| ATOM | 5471 | CG | ARG | 686 | 67.226 | 12.842 | −17.921 | 1.00 | 36.83 | | C |
| ATOM | 5472 | CD | ARG | 686 | 66.246 | 11.852 | −18.570 | 1.00 | 36.83 | | C |
| ATOM | 5473 | NE | ARG | 686 | 65.052 | 12.503 | −19.108 | 1.00 | 36.83 | | N |
| ATOM | 5474 | CZ | ARG | 686 | 64.129 | 13.118 | −18.372 | 1.00 | 36.83 | | C |
| ATOM | 5475 | NH1 | ARG | 686 | 64.248 | 13.171 | −17.049 | 1.00 | 36.83 | | N |
| ATOM | 5476 | NH2 | ARG | 686 | 63.089 | 13.691 | −18.968 | 1.00 | 36.83 | | N |
| ATOM | 5477 | C | ARG | 686 | 70.626 | 13.876 | −18.894 | 1.00 | 36.83 | | C |
| ATOM | 5478 | O | ARG | 686 | 71.334 | 13.002 | −18.389 | 1.00 | 36.83 | | O |
| ATOM | 5479 | N | ILE | 687 | 70.969 | 14.511 | −20.008 | 1.00 | 36.83 | | N |
| ATOM | 5480 | CA | ILE | 687 | 72.206 | 14.165 | −20.696 | 1.00 | 36.83 | | C |
| ATOM | 5481 | CB | ILE | 687 | 72.383 | 14.972 | −22.010 | 1.00 | 36.83 | | C |
| ATOM | 5482 | CG2 | ILE | 687 | 73.297 | 16.168 | −21.803 | 1.00 | 36.83 | | C |
| ATOM | 5483 | CG1 | ILE | 687 | 72.987 | 14.070 | −23.082 | 1.00 | 36.83 | | C |
| ATOM | 5484 | CD1 | ILE | 687 | 74.215 | 13.318 | −22.632 | 1.00 | 36.83 | | C |
| ATOM | 5485 | C | ILE | 687 | 73.360 | 14.436 | −19.755 | 1.00 | 36.83 | | C |
| ATOM | 5486 | O | ILE | 687 | 74.352 | 13.724 | −19.758 | 1.00 | 36.83 | | O |
| ATOM | 5487 | N | THR | 688 | 73.237 | 15.481 | −18.947 | 1.00 | 36.83 | | N |
| ATOM | 5488 | CA | THR | 688 | 74.289 | 15.779 | −17.999 | 1.00 | 36.83 | | C |
| ATOM | 5489 | CB | THR | 688 | 74.004 | 17.078 | −17.211 | 1.00 | 36.83 | | C |
| ATOM | 5490 | OG1 | THR | 688 | 74.188 | 18.221 | −18.069 | 1.00 | 36.83 | | O |
| ATOM | 5491 | CG2 | THR | 688 | 74.934 | 17.187 | −16.014 | 1.00 | 36.83 | | C |
| ATOM | 5492 | C | THR | 688 | 74.357 | 14.601 | −17.033 | 1.00 | 36.83 | | C |
| ATOM | 5493 | O | THR | 688 | 75.081 | 13.636 | −17.272 | 1.00 | 36.83 | | O |
| ATOM | 5494 | N | ARG | 689 | 73.574 | 14.660 | −15.967 | 1.00 | 36.83 | | N |
| ATOM | 5495 | CA | ARG | 689 | 73.573 | 13.610 | −14.958 | 1.00 | 36.83 | | C |
| ATOM | 5496 | CB | ARG | 689 | 72.199 | 13.523 | −14.313 | 1.00 | 36.83 | | C |
| ATOM | 5497 | CG | ARG | 689 | 71.740 | 14.837 | −43.740 | 1.00 | 36.83 | | C |
| ATOM | 5498 | CD | ARG | 689 | 70.245 | 14.996 | −13.900 | 1.00 | 36.83 | | C |
| ATOM | 5499 | NE | ARG | 689 | 69.492 | 14.136 | −12.991 | 1.00 | 36.83 | | N |
| ATOM | 5500 | CZ | ARG | 689 | 68.936 | 12.977 | −13.328 | 1.00 | 36.83 | | C |
| ATOM | 5501 | NH1 | ARG | 689 | 69.040 | 12.508 | −14.569 | 1.00 | 36.83 | | N |
| ATOM | 5502 | NH2 | ARG | 689 | 68.255 | 12.295 | −12.418 | 1.00 | 36.83 | | N |
| ATOM | 5503 | C | ARG | 689 | 73.965 | 12.238 | −15.490 | 1.00 | 36.83 | | C |
| ATOM | 5504 | O | ARG | 689 | 74.904 | 11.607 | −14.985 | 1.00 | 36.83 | | O |
| ATOM | 5505 | N | LYS | 690 | 73.254 | 11.792 | −16.522 | 1.00 | 36.83 | | N |
| ATOM | 5506 | CA | LYS | 690 | 73.483 | 10.488 | −17.134 | 1.00 | 36.83 | | C |
| ATOM | 5507 | CB | LYS | 690 | 72.231 | 10.098 | −17.917 | 1.00 | 36.83 | | C |
| ATOM | 5508 | CG | LYS | 690 | 72.480 | 9.293 | −19.170 | 1.00 | 36.83 | | C |
| ATOM | 5509 | CD | LYS | 690 | 71.198 | 9.134 | −19.987 | 1.00 | 36.83 | | C |
| ATOM | 5510 | CE | LYS | 690 | 70.114 | 8.360 | −19.236 | 1.00 | 36.83 | | C |
| ATOM | 5511 | NZ | LYS | 690 | 69.018 | 7.911 | −20.163 | 1.00 | 36.83 | | N |
| ATOM | 5512 | C | LYS | 690 | 74.720 | 10.415 | −18.036 | 1.00 | 36.83 | | C |
| ATOM | 5513 | O | LYS | 690 | 75.202 | 9.323 | −18.358 | 1.00 | 36.83 | | O |
| ATOM | 5514 | N | GLY | 691 | 75.249 | 11.571 | −18.431 | 1.00 | 36.83 | | N |
| ATOM | 5515 | CA | GLY | 691 | 76.403 | 11.577 | −19.314 | 1.00 | 36.83 | | C |
| ATOM | 5516 | C | GLY | 691 | 77.802 | 11.700 | −18.719 | 1.00 | 36.83 | | C |
| ATOM | 5517 | O | GLY | 691 | 78.009 | 11.793 | −17.504 | 1.00 | 36.83 | | O |
| ATOM | 5518 | N | PHE | 692 | 78.774 | 11.795 | −19.619 | 1.00 | 36.83 | | N |
| ATOM | 5519 | CA | PHE | 692 | 80.178 | 11.922 | −19.254 | 1.00 | 36.83 | | C |
| ATOM | 5520 | CB | PHE | 692 | 80.984 | 10.763 | −19.851 | 1.00 | 36.83 | | C |
| ATOM | 5521 | CG | PHE | 692 | 80.443 | 9.407 | −19.475 | 1.00 | 36.83 | | C |
| ATOM | 5522 | CD1 | PHE | 692 | 80.405 | 9.008 | −18.146 | 1.00 | 36.83 | | C |
| ATOM | 5523 | CD2 | PHE | 692 | 79.920 | 8.556 | −20.448 | 1.00 | 36.83 | | C |
| ATOM | 5524 | CE1 | PHE | 692 | 79.850 | 7.779 | −17.780 | 1.00 | 36.83 | | C |
| ATOM | 5525 | CE2 | PHE | 692 | 79.362 | 7.327 | −20.099 | 1.00 | 36.83 | | C |
| ATOM | 5526 | CZ | PHE | 692 | 79.326 | 6.941 | −18.760 | 1.00 | 36.83 | | C |
| ATOM | 5527 | C | PHE | 692 | 80.676 | 13.256 | −19.793 | 1.00 | 36.83 | | C |
| ATOM | 5528 | O | PHE | 692 | 81.208 | 13.347 | −20.909 | 1.00 | 36.83 | | O |
| ATOM | 5529 | N | PRO | 693 | 80.488 | 14.314 | −19.004 | 1.00 | 36.83 | | N |
| ATOM | 5530 | CD | PRO | 693 | 79.901 | 14.212 | −17.655 | 1.00 | 36.83 | | C |
| ATOM | 5531 | CA | PRO | 693 | 80.882 | 15.692 | −19.308 | 1.00 | 36.83 | | C |
| ATOM | 5532 | CB | PRO | 693 | 80.837 | 16.356 | −17.938 | 1.00 | 36.83 | | C |
| ATOM | 5533 | CG | PRO | 693 | 79.630 | 15.660 | −17.300 | 1.00 | 36.83 | | C |
| ATOM | 5534 | C | PRO | 693 | 82.259 | 15.826 | −19.971 | 1.00 | 36.83 | | C |
| ATOM | 5535 | O | PRO | 693 | 82.396 | 15.703 | −21.200 | 1.00 | 36.83 | | O |
| ATOM | 5536 | N | ASN | 694 | 83.274 | 16.085 | −19.149 | 1.00 | 36.83 | | N |
| ATOM | 5537 | CA | ASN | 694 | 84.643 | 16.261 | −19.639 | 1.00 | 36.83 | | C |
| ATOM | 5538 | CB | ASN | 694 | 85.507 | 16.942 | −18.573 | 1.00 | 36.83 | | C |
| ATOM | 5539 | CG | ASN | 694 | 84.778 | 18.083 | −17.854 | 1.00 | 36.83 | | C |
| ATOM | 5540 | OD1 | ASN | 694 | 85.355 | 18.762 | −16.985 | 1.00 | 36.83 | | O |
| ATOM | 5541 | ND2 | ASN | 694 | 83.499 | 18.295 | −18.205 | 1.00 | 36.83 | | N |
| ATOM | 5542 | C | ASN | 694 | 85.238 | 14.904 | −19.997 | 1.00 | 36.83 | | C |
| ATOM | 5543 | O | ASN | 694 | 84.722 | 13.860 | −19.581 | 1.00 | 36.83 | | O |
| ATOM | 5544 | N | ARG | 695 | 86.312 | 14.916 | −20.779 | 1.00 | 36.83 | | N |
| ATOM | 5545 | CA | ARG | 695 | 86.971 | 13.679 | −21.190 | 1.00 | 36.83 | | C |
| ATOM | 5546 | CB | ARG | 695 | 86.632 | 13.376 | −22.644 | 1.00 | 36.83 | | C |
| ATOM | 5547 | CG | ARG | 695 | 85.136 | 13.365 | −22.955 | 1.00 | 36.83 | | C |
| ATOM | 5548 | CD | ARG | 695 | 84.810 | 14.143 | −24.234 | 1.00 | 36.83 | | C |
| ATOM | 5549 | NE | ARG | 695 | 85.811 | 13.955 | −25.288 | 1.00 | 36.83 | | N |
| ATOM | 5550 | CZ | ARG | 695 | 86.988 | 14.583 | −25.342 | 1.00 | 36.83 | | C |
| ATOM | 5551 | NH1 | ARG | 695 | 87.331 | 15.460 | −24.395 | 1.00 | 36.83 | | N |
| ATOM | 5552 | NH2 | ARG | 695 | 87.826 | 14.335 | −26.353 | 1.00 | 36.83 | | N |
| ATOM | 5553 | C | ARG | 695 | 88.480 | 13.861 | −21.038 | 1.00 | 36.83 | | C |
| ATOM | 5554 | O | ARG | 695 | 89.258 | 13.422 | −21.894 | 1.00 | 36.83 | | O |
| ATOM | 5555 | N | ILE | 696 | 88.885 | 14.499 | −19.937 | 1.00 | 36.83 | | N |
| ATOM | 5556 | CA | ILE | 696 | 90.300 | 14.789 | −19.672 | 1.00 | 36.83 | | C |
| ATOM | 5557 | CB | ILE | 696 | 90.536 | 15.120 | −18.181 | 1.00 | 36.83 | | C |
| ATOM | 5558 | CG2 | ILE | 696 | 89.968 | 16.503 | −17.866 | 1.00 | 36.83 | | C |
| ATOM | 5559 | CG1 | ILE | 696 | 89.929 | 14.030 | −17.297 | 1.00 | 36.83 | | C |
| ATOM | 5560 | CD1 | ILE | 696 | 90.200 | 14.223 | −15.817 | 1.00 | 36.83 | | C |
| ATOM | 5561 | C | ILE | 696 | 91.304 | 13.721 | −20.101 | 1.00 | 36.83 | | C |
| ATOM | 5562 | O | ILE | 696 | 90.954 | 12.553 | −20.345 | 1.00 | 36.83 | | O |
| ATOM | 5563 | N | ILE | 697 | 92.564 | 14.134 | −20.182 | 1.00 | 36.83 | | N |
| ATOM | 5564 | CA | ILE | 697 | 93.633 | 13.236 | −20.599 | 1.00 | 36.83 | | C |
| ATOM | 5565 | CB | ILE | 697 | 93.968 | 13.485 | −22.099 | 1.00 | 36.83 | | C |
| ATOM | 5566 | CG2 | ILE | 697 | 92.949 | 12.776 | −22.990 | 1.00 | 36.83 | | C |
| ATOM | 5567 | CG1 | ILE | 697 | 93.924 | 14.993 | −22.387 | 1.00 | 36.83 | | C |
| ATOM | 5568 | CD1 | ILE | 697 | 94.406 | 15.392 | −23.776 | 1.00 | 36.83 | | C |
| ATOM | 5569 | C | ILE | 697 | 94.914 | 13.349 | −19.749 | 1.00 | 36.83 | | C |
| ATOM | 5570 | O | ILE | 697 | 95.415 | 14.449 | −19.486 | 1.00 | 36.83 | | O |
| ATOM | 5571 | N | TYR | 698 | 95.430 | 12.203 | −19.316 | 0.00 | 36.83 | | N |
| ATOM | 5572 | CA | TYR | 698 | 96.661 | 12.150 | −18.529 | 0.00 | 36.83 | | C |
| ATOM | 5573 | CB | TYR | 698 | 97.865 | 12.237 | −19.472 | 1.00 | 36.83 | | C |
| ATOM | 5574 | CG | TYR | 698 | 97.490 | 11.994 | −20.921 | 1.00 | 36.83 | | C |
| ATOM | 5575 | CD1 | TYR | 698 | 96.936 | 10.770 | −21.326 | 1.00 | 36.83 | | C |
| ATOM | 5576 | CE1 | TYR | 698 | 96.508 | 10.562 | −22.647 | 1.00 | 36.83 | | C |
| ATOM | 5577 | CD2 | TYR | 698 | 97.624 | 13.010 | −21.872 | 1.00 | 36.83 | | C |
| ATOM | 5578 | CE2 | TYR | 698 | 97.211 | 12.823 | −23.194 | 1.00 | 36.83 | | C |
| ATOM | 5579 | CZ | TYR | 698 | 96.646 | 11.598 | −23.576 | 1.00 | 36.83 | | C |
| ATOM | 5580 | OH | TYR | 698 | 96.188 | 11.431 | −24.862 | 1.00 | 36.83 | | O |
| ATOM | 5581 | C | TYR | 698 | 96.741 | 13.265 | −17.489 | 0.00 | 36.83 | | C |
| ATOM | 5582 | O | TYR | 698 | 97.788 | 13.892 | −17.319 | 0.00 | 36.83 | | O |
| ATOM | 5583 | N | ALA | 699 | 95.634 | 13.510 | −16.796 | 0.00 | 36.83 | | N |
| ATOM | 5584 | CA | ALA | 699 | 95.588 | 14.551 | −15.776 | 0.00 | 36.83 | | C |
| ATOM | 5585 | CB | ALA | 699 | 94.161 | 15.064 | −15.620 | 0.00 | 36.83 | | C |
| ATOM | 5586 | C | ALA | 699 | 96.107 | 14.032 | −14.440 | 0.00 | 36.83 | | C |
| ATOM | 5587 | O | ALA | 699 | 95.811 | 12.905 | −14.044 | 0.00 | 36.83 | | O |
| ATOM | 5588 | N | ASP | 700 | 96.882 | 14.862 | −13.748 | 0.00 | 36.83 | | N |
| ATOM | 5589 | CA | ASP | 700 | 97.443 | 14.489 | −12.455 | 0.00 | 36.83 | | C |
| ATOM | 5590 | CB | ASP | 700 | 98.754 | 13.722 | −12.651 | 0.00 | 36.83 | | C |
| ATOM | 5591 | CG | ASP | 700 | 99.342 | 13.226 | −11.343 | 0.00 | 36.83 | | C |
| ATOM | 5592 | OD1 | ASP | 700 | 100.427 | 12.607 | −11.376 | 0.00 | 36.83 | | O |
| ATOM | 5593 | OD2 | ASP | 700 | 98.720 | 13.450 | −10.283 | 0.00 | 36.83 | | O |
| ATOM | 5594 | C | ASP | 700 | 97.692 | 15.725 | −11.596 | 0.00 | 36.83 | | C |
| ATOM | 5595 | O | ASP | 700 | 96.856 | 16.099 | −10.774 | 0.00 | 36.83 | | O |
| ATOM | 5596 | N | PHE | 701 | 98.846 | 16.356 | −11.793 | 0.00 | 36.83 | | N |
| ATOM | 5597 | CA | PHE | 701 | 99.205 | 17.550 | −11.036 | 0.00 | 36.83 | | C |
| ATOM | 5598 | CB | PHE | 701 | 99.676 | 17.159 | −9.632 | 0.00 | 36.83 | | C |
| ATOM | 5599 | CG | PHE | 701 | 100.007 | 18.333 | −8.753 | 0.00 | 36.83 | | C |
| ATOM | 5600 | CD1 | PHE | 701 | 99.041 | 19.288 | −8.453 | 0.00 | 36.83 | | C |
| ATOM | 5601 | CD2 | PHE | 701 | 101.284 | 18.483 | −8.224 | 0.00 | 36.83 | | C |
| ATOM | 5602 | CE1 | PHE | 701 | 99.343 | 20.377 | −7.638 | 0.00 | 36.83 | | C |
| ATOM | 5603 | CE2 | PHE | 701 | 101.597 | 19.568 | −7.407 | 0.00 | 36.83 | | C |
| ATOM | 5604 | CZ | PHE | 701 | 100.623 | 20.517 | −7.114 | 0.00 | 36.83 | | C |
| ATOM | 5605 | C | PHE | 701 | 100.302 | 18.335 | −11.748 | 0.00 | 36.83 | | C |
| ATOM | 5606 | O | PHE | 701 | 101.185 | 17.754 | −12.379 | 0.00 | 36.83 | | O |
| ATOM | 5607 | N | VAL | 702 | 100.240 | 19.659 | −11.641 | 0.00 | 36.83 | | N |
| ATOM | 5608 | CA | VAL | 702 | 101.224 | 20.528 | −12.275 | 0.00 | 36.83 | | C |
| ATOM | 5609 | CB | VAL | 702 | 100.799 | 22.010 | −12.182 | 0.00 | 36.83 | | C |
| ATOM | 5610 | CG1 | VAL | 702 | 99.478 | 22.217 | −12.904 | 0.00 | 36.83 | | C |
| ATOM | 5611 | CG2 | VAL | 702 | 100.678 | 22.426 | −10.725 | 0.00 | 36.83 | | C |
| ATOM | 5612 | C | VAL | 702 | 102.600 | 20.375 | −11.635 | 0.00 | 36.83 | | C |
| ATOM | 5613 | O | VAL | 702 | 102.714 | 20.009 | −10.466 | 0.00 | 36.83 | | O |
| ATOM | 5614 | N | LYS | 703 | 103.641 | 20.658 | −12.411 | 0.00 | 36.83 | | N |
| ATOM | 5615 | CA | LYS | 703 | 105.012 | 20.554 | −11.925 | 0.00 | 36.83 | | C |
| ATOM | 5616 | CB | LYS | 703 | 105.980 | 20.425 | −13.104 | 0.00 | 36.83 | | C |
| ATOM | 5617 | CG | LYS | 703 | 107.441 | 20.294 | −12.701 | 0.00 | 36.83 | | C |
| ATOM | 5618 | CD | LYS | 703 | 108.350 | 20.191 | −13.918 | 0.00 | 36.83 | | C |
| ATOM | 5619 | CE | LYS | 703 | 108.046 | 18.948 | −14.741 | 0.00 | 36.83 | | C |
| ATOM | 5620 | NZ | LYS | 703 | 108.930 | 18.843 | −15.934 | 0.00 | 36.83 | | N |
| ATOM | 5621 | C | LYS | 703 | 105.382 | 21.774 | −11.089 | 0.00 | 36.83 | | C |
| ATOM | 5622 | O | LYS | 703 | 105.230 | 22.912 | −11.534 | 0.00 | 36.83 | | O |
| ATOM | 5623 | N | ARG | 704 | 105.867 | 21.531 | −9.876 | 0.00 | 36.83 | | N |
| ATOM | 5624 | CA | ARG | 704 | 106.258 | 22.610 | −8.977 | 0.00 | 36.83 | | C |
| ATOM | 5625 | CB | ARG | 704 | 105.028 | 23.160 | −8.248 | 0.00 | 36.83 | | C |
| ATOM | 5626 | CG | ARG | 704 | 105.315 | 24.316 | −7.298 | 0.00 | 36.83 | | C |
| ATOM | 5627 | CD | ARG | 704 | 105.772 | 25.568 | −8.037 | 0.00 | 36.83 | | C |
| ATOM | 5628 | NE | ARG | 704 | 107.056 | 25.385 | −8.708 | 0.00 | 36.83 | | N |
| ATOM | 5629 | CZ | ARG | 704 | 107.669 | 26.326 | −9.419 | 0.00 | 36.83 | | C |
| ATOM | 5630 | NH1 | ARG | 704 | 108.836 | 26.070 | −9.994 | 0.00 | 36.83 | | N |
| ATOM | 5631 | NH2 | ARG | 704 | 107.117 | 27.524 | −9.555 | 0.00 | 36.83 | | N |
| ATOM | 5632 | C | ARG | 704 | 107.286 | 22.129 | −7.958 | 0.00 | 36.83 | | C |
| ATOM | 5633 | O | ARG | 704 | 108.447 | 22.335 | −7.995 | 0.00 | 36.83 | | O |
| ATOM | 5634 | N | TYR | 705 | 106.850 | 21.262 | −7.049 | 0.00 | 36.83 | | N |
| ATOM | 5635 | CA | TYR | 705 | 107.730 | 20.725 | −6.018 | 0.00 | 36.83 | | C |
| ATOM | 5636 | CB | TYR | 705 | 106.905 | 20.141 | −4.867 | 0.00 | 36.83 | | C |
| ATOM | 5637 | CG | TYR | 705 | 106.076 | 21.161 | −4.118 | 0.00 | 36.83 | | C |
| ATOM | 5638 | CD1 | TYR | 705 | 105.056 | 21.867 | −4.756 | 0.00 | 36.83 | | C |
| ATOM | 5639 | CE1 | TYR | 705 | 104.291 | 22.807 | −4.069 | 0.00 | 36.83 | | C |
| ATOM | 5640 | CD2 | TYR | 705 | 106.312 | 21.422 | −2.768 | 0.00 | 36.83 | | C |
| ATOM | 5641 | CE2 | TYR | 705 | 105.553 | 22.360 | −2.072 | 0.00 | 36.83 | | C |
| ATOM | 5642 | CZ | TYR | 705 | 104.545 | 23.048 | −2.728 | 0.00 | 36.83 | | C |
| ATOM | 5643 | OH | TYR | 705 | 103.793 | 23.976 | −2.045 | 0.00 | 36.83 | | O |
| ATOM | 5644 | C | TYR | 705 | 108.650 | 19.649 | −6.584 | 0.00 | 36.83 | | C |
| ATOM | 5645 | O | TYR | 705 | 108.602 | 19.342 | −7.776 | 0.00 | 36.83 | | O |
| ATOM | 5646 | N | TYR | 706 | 109.485 | 19.080 | −5.722 | 0.00 | 36.83 | | N |
| ATOM | 5647 | CA | TYR | 706 | 110.419 | 18.037 | −6.130 | 0.00 | 36.83 | | C |
| ATOM | 5648 | CB | TYR | 706 | 111.859 | 18.490 | −5.866 | 0.00 | 36.83 | | C |
| ATOM | 5649 | CG | TYR | 706 | 112.101 | 19.027 | −4.471 | 0.00 | 36.83 | | C |
| ATOM | 5650 | CD1 | TYR | 706 | 111.972 | 18.206 | −3.351 | 0.00 | 36.83 | | C |
| ATOM | 5651 | CE1 | TYR | 706 | 112.193 | 18.699 | −2.067 | 0.00 | 36.83 | | C |
| ATOM | 5652 | CD2 | TYR | 706 | 112.459 | 20.360 | −4.271 | 0.00 | 36.83 | | C |
| ATOM | 5653 | CE2 | TYR | 706 | 112.683 | 20.863 | −2.991 | 0.00 | 36.83 | | C |
| ATOM | 5654 | CZ | TYR | 706 | 112.548 | 20.027 | −1.895 | 0.00 | 36.83 | | C |
| ATOM | 5655 | OH | TYR | 706 | 112.767 | 20.519 | −0.628 | 0.00 | 36.83 | | O |
| ATOM | 5656 | C | TYR | 706 | 110.142 | 16.721 | −5.409 | 0.00 | 36.83 | | C |
| ATOM | 5657 | O | TYR | 706 | 109.028 | 16.481 | −4.944 | 0.00 | 36.83 | | O |
| ATOM | 5658 | N | LEU | 707 | 111.161 | 15.872 | −5.322 | 0.00 | 36.83 | | N |
| ATOM | 5659 | CA | LEU | 707 | 111.032 | 14.578 | −4.663 | 0.00 | 36.83 | | C |
| ATOM | 5660 | CB | LEU | 707 | 112.378 | 13.847 | −4.671 | 0.00 | 36.83 | | C |
| ATOM | 5661 | CG | LEU | 707 | 112.414 | 12.458 | −4.028 | 0.00 | 36.83 | | C |
| ATOM | 5662 | CD1 | LEU | 707 | 111.442 | 11.531 | −4.743 | 0.00 | 36.83 | | C |
| ATOM | 5663 | CD2 | LEU | 707 | 113.827 | 11.903 | −4.096 | 0.00 | 36.83 | | C |
| ATOM | 5664 | C | LEU | 707 | 110.539 | 14.727 | −3.227 | 0.00 | 36.83 | | C |
| ATOM | 5665 | O | LEU | 707 | 111.275 | 15.180 | −2.351 | 0.00 | 36.83 | | O |
| ATOM | 5666 | N | LEU | 708 | 109.288 | 14.341 | −2.996 | 0.00 | 36.83 | | N |
| ATOM | 5667 | CA | LEU | 708 | 108.687 | 14.424 | −1.669 | 0.00 | 36.83 | | C |
| ATOM | 5668 | CB | LEU | 708 | 107.943 | 15.753 | −1.508 | 0.00 | 36.83 | | C |
| ATOM | 5669 | CG | LEU | 708 | 108.791 | 17.028 | −1.532 | 0.00 | 36.83 | | C |
| ATOM | 5670 | CD1 | LEU | 708 | 107.884 | 18.247 | −1.480 | 0.00 | 36.83 | | C |
| ATOM | 5671 | CD2 | LEU | 708 | 109.753 | 17.025 | −0.354 | 0.00 | 36.83 | | C |
| ATOM | 5672 | C | LEU | 708 | 107.724 | 13.266 | −1.435 | 0.00 | 36.83 | | C |
| ATOM | 5673 | O | LEU | 708 | 108.057 | 12.298 | −0.752 | 0.00 | 36.83 | | O |
| ATOM | 5674 | N | ALA | 709 | 106.528 | 13.373 | −2.007 | 0.00 | 36.83 | | N |
| ATOM | 5675 | CA | ALA | 709 | 105.514 | 12.337 | −1.862 | 0.00 | 36.83 | | C |
| ATOM | 5676 | CB | ALA | 709 | 104.214 | 12.785 | −2.519 | 0.00 | 36.83 | | C |
| ATOM | 5677 | C | ALA | 709 | 105.990 | 11.027 | −2.484 | 0.00 | 36.83 | | C |
| ATOM | 5678 | O | ALA | 709 | 106.711 | 11.029 | −3.482 | 0.00 | 36.83 | | O |
| ATOM | 5679 | N | PRO | 710 | 105.591 | 9.888 | −1.895 | 0.00 | 36.83 | | N |
| ATOM | 5680 | CD | PRO | 710 | 104.782 | 9.776 | −0.668 | 0.00 | 36.83 | | C |
| ATOM | 5681 | CA | PRO | 710 | 105.972 | 8.560 | −2.386 | 0.00 | 36.83 | | C |
| ATOM | 5682 | CB | PRO | 710 | 105.157 | 7.624 | −1.500 | 0.00 | 36.83 | | C |
| ATOM | 5683 | CG | PRO | 710 | 105.095 | 8.371 | −0.208 | 0.00 | 36.83 | | C |
| ATOM | 5684 | C | PRO | 710 | 105.667 | 8.366 | −3.869 | 0.00 | 36.83 | | C |
| ATOM | 5685 | O | PRO | 710 | 106.202 | 7.460 | −4.508 | 0.00 | 36.83 | | O |
| ATOM | 5686 | N | ASN | 711 | 104.803 | 9.220 | −4.409 | 1.00 | 36.83 | | N |
| ATOM | 5687 | CA | ASN | 711 | 104.424 | 9.140 | −5.818 | 1.00 | 36.83 | | C |
| ATOM | 5688 | CB | ASN | 711 | 102.915 | 8.911 | −5.942 | 0.00 | 36.83 | | C |
| ATOM | 5689 | CG | ASN | 711 | 102.103 | 10.012 | −5.290 | 0.00 | 36.83 | | C |
| ATOM | 5690 | OD1 | ASN | 711 | 102.209 | 10.247 | −4.086 | 0.00 | 36.83 | | O |
| ATOM | 5691 | ND2 | ASN | 711 | 101.286 | 10.694 | −6.083 | 0.00 | 36.83 | | N |
| ATOM | 5692 | C | ASN | 711 | 104.819 | 10.401 | −6.603 | 1.00 | 36.83 | | C |
| ATOM | 5693 | O | ASN | 711 | 104.584 | 11.532 | −6.157 | 1.00 | 36.83 | | O |
| ATOM | 5694 | N | VAL | 712 | 105.433 | 10.197 | −7.764 | 0.00 | 36.83 | | N |
| ATOM | 5695 | CA | VAL | 712 | 105.842 | 11.302 | −8.624 | 0.00 | 36.83 | | C |
| ATOM | 5696 | CB | VAL | 712 | 107.335 | 11.655 | −8.412 | 0.00 | 36.83 | | C |
| ATOM | 5697 | CG1 | VAL | 712 | 107.674 | 12.951 | −9.134 | 0.00 | 36.83 | | C |
| ATOM | 5698 | CG2 | VAL | 712 | 107.637 | 11.784 | −6.927 | 0.00 | 36.83 | | C |
| ATOM | 5699 | C | VAL | 712 | 105.623 | 10.921 | −10.092 | 0.00 | 36.83 | | C |
| ATOM | 5700 | O | VAL | 712 | 106.477 | 11.168 | −10.943 | 0.00 | 36.83 | | O |
| ATOM | 5701 | N | PRO | 713 | 104.468 | 10.305 | −10.407 | 1.00 | 36.83 | | N |
| ATOM | 5702 | CD | PRO | 713 | 103.476 | 9.717 | −9.484 | 1.00 | 36.83 | | C |
| ATOM | 5703 | CA | PRO | 713 | 104.187 | 9.906 | −11.791 | 1.00 | 36.83 | | C |
| ATOM | 5704 | CB | PRO | 713 | 103.040 | 8.901 | −11.638 | 1.00 | 36.83 | | C |
| ATOM | 5705 | CG | PRO | 713 | 102.315 | 9.397 | −10.407 | 1.00 | 36.83 | | C |
| ATOM | 5706 | C | PRO | 713 | 103.834 | 11.054 | −12.727 | 1.00 | 36.83 | | C |
| ATOM | 5707 | O | PRO | 713 | 102.647 | 11.356 | −12.953 | 1.00 | 36.83 | | O |
| ATOM | 5708 | N | ARG | 714 | 104.872 | 11.679 | −13.282 | 1.00 | 36.83 | | N |
| ATOM | 5709 | CA | ARG | 714 | 104.705 | 12.803 | −14.198 | 1.00 | 36.83 | | C |
| ATOM | 5710 | CB | ARG | 714 | 105.870 | 13.786 | −14.035 | 0.00 | 36.83 | | C |
| ATOM | 5711 | CG | ARG | 714 | 105.755 | 15.074 | −14.847 | 0.00 | 36.83 | | C |
| ATOM | 5712 | CD | ARG | 714 | 106.078 | 14.857 | −16.319 | 0.00 | 36.83 | | C |
| ATOM | 5713 | NE | ARG | 714 | 106.052 | 16.107 | −17.075 | 0.00 | 36.83 | | N |
| ATOM | 5714 | CZ | ARG | 714 | 106.335 | 16.203 | −18.370 | 0.00 | 36.83 | | C |
| ATOM | 5715 | NH1 | ARG | 714 | 106.287 | 17.382 | −18.976 | 0.00 | 36.83 | | N |
| ATOM | 5716 | NH2 | ARG | 714 | 106.668 | 15.121 | −19.061 | 0.00 | 36.83 | | N |
| ATOM | 5717 | C | ARG | 714 | 104.651 | 12.272 | −15.624 | 1.00 | 36.83 | | C |
| ATOM | 5718 | O | ARG | 714 | 103.649 | 12.441 | −16.329 | 1.00 | 36.83 | | O |
| ATOM | 5719 | N | ASP | 715 | 105.737 | 11.631 | −16.044 | 1.00 | 36.83 | | N |
| ATOM | 5720 | CA | ASP | 715 | 105.818 | 11.066 | −17.383 | 1.00 | 36.83 | | C |
| ATOM | 5721 | CB | ASP | 715 | 107.103 | 11.525 | −18.081 | 0.00 | 36.83 | | C |
| ATOM | 5722 | CG | ASP | 715 | 108.357 | 11.128 | −17.323 | 0.00 | 36.83 | | C |
| ATOM | 5723 | OD1 | ASP | 715 | 108.631 | 9.914 | −17.210 | 0.00 | 36.83 | | O |
| ATOM | 5724 | OD2 | ASP | 715 | 109.070 | 12.032 | −16.839 | 0.00 | 36.83 | | O |
| ATOM | 5725 | C | ASP | 715 | 105.822 | 9.562 | −17.207 | 1.00 | 36.83 | | C |
| ATOM | 5726 | O | ASP | 715 | 106.467 | 9.047 | −16.296 | 1.00 | 36.83 | | O |
| ATOM | 5727 | N | ALA | 716 | 105.095 | 8.853 | −18.065 | 1.00 | 36.83 | | N |
| ATOM | 5728 | CA | ALA | 716 | 105.029 | 7.400 | −17.963 | 1.00 | 36.83 | | C |
| ATOM | 5729 | CB | ALA | 716 | 103.788 | 6.988 | −17.160 | 1.00 | 36.83 | | C |
| ATOM | 5730 | C | ALA | 716 | 105.004 | 6.769 | −19.350 | 1.00 | 36.83 | | C |
| ATOM | 5731 | O | ALA | 716 | 105.312 | 7.427 | −20.350 | 1.00 | 36.83 | | O |
| ATOM | 5732 | N | GLU | 717 | 104.657 | 5.487 | −19.408 | 1.00 | 36.83 | | N |
| ATOM | 5733 | CA | GLU | 717 | 104.591 | 4.766 | −20.682 | 1.00 | 36.83 | | C |
| ATOM | 5734 | CB | GLU | 717 | 105.377 | 3.456 | −20.595 | 0.00 | 36.83 | | C |
| ATOM | 5735 | CG | GLU | 717 | 105.384 | 2.646 | −21.882 | 0.00 | 36.83 | | C |
| ATOM | 5736 | CD | GLU | 717 | 106.179 | 1.360 | −21.758 | 0.00 | 36.83 | | C |
| ATOM | 5737 | OE1 | GLU | 717 | 107.391 | 1.436 | −21.467 | 0.00 | 36.83 | | O |
| ATOM | 5738 | OE2 | GLU | 717 | 105.593 | 0.275 | −21.952 | 0.00 | 36.83 | | O |
| ATOM | 5739 | C | GLU | 717 | 103.125 | 4.474 | −20.954 | 1.00 | 36.83 | | C |
| ATOM | 5740 | O | GLU | 717 | 102.706 | 4.324 | −22.105 | 1.00 | 36.83 | | O |
| ATOM | 5741 | N | ASP | 718 | 102.354 | 4.405 | −19.871 | 1.00 | 36.83 | | N |
| ATOM | 5742 | CA | ASP | 718 | 100.919 | 4.141 | −19.938 | 1.00 | 36.83 | | C |
| ATOM | 5743 | CB | ASP | 718 | 100.647 | 2.705 | −19.490 | 1.00 | 36.83 | | C |
| ATOM | 5744 | CG | ASP | 718 | 99.238 | 2.261 | −19.789 | 1.00 | 36.83 | | C |
| ATOM | 5745 | OD1 | ASP | 718 | 98.903 | 2.133 | −20.995 | 1.00 | 36.83 | | O |
| ATOM | 5746 | OD2 | ASP | 718 | 98.474 | 2.045 | −18.819 | 1.00 | 36.83 | | O |
| ATOM | 5747 | C | ASP | 718 | 100.221 | 5.135 | −18.992 | 1.00 | 36.83 | | C |
| ATOM | 5748 | O | ASP | 718 | 100.255 | 4.977 | −17.761 | 1.00 | 36.83 | | O |
| ATOM | 5749 | N | SER | 719 | 99.606 | 6.159 | −19.575 | 0.00 | 36.83 | | N |
| ATOM | 5750 | CA | SER | 719 | 98.922 | 7.198 | −18.813 | 0.00 | 36.83 | | C |
| ATOM | 5751 | CB | SER | 719 | 98.737 | 8.439 | −19.687 | 0.00 | 36.83 | | C |
| ATOM | 5752 | OG | SER | 719 | 98.019 | 8.120 | −20.867 | 0.00 | 36.83 | | O |
| ATOM | 5753 | C | SER | 719 | 97.570 | 6.771 | −18.251 | 0.00 | 36.83 | | C |
| ATOM | 5754 | O | SER | 719 | 97.080 | 7.358 | −17.286 | 0.00 | 36.83 | | O |
| ATOM | 5755 | N | GLN | 720 | 96.968 | 5.755 | −18.860 | 1.00 | 36.83 | | N |
| ATOM | 5756 | CA | GLN | 720 | 95.669 | 5.251 | −18.417 | 1.00 | 36.83 | | C |
| ATOM | 5757 | CB | GLN | 720 | 95.133 | 4.230 | −19.424 | 0.00 | 36.83 | | C |
| ATOM | 5758 | CG | GLN | 720 | 95.127 | 4.712 | −20.868 | 0.00 | 36.83 | | C |
| ATOM | 5759 | CD | GLN | 720 | 94.223 | 5.909 | −21.089 | 0.00 | 36.83 | | C |
| ATOM | 5760 | OE1 | GLN | 720 | 94.423 | 6.971 | −20.500 | 0.00 | 36.83 | | O |
| ATOM | 5761 | NE2 | GLN | 720 | 93.220 | 5.742 | −21.943 | 0.00 | 36.83 | | N |
| ATOM | 5762 | C | GLN | 720 | 95.813 | 4.587 | −17.047 | 1.00 | 36.83 | | C |
| ATOM | 5763 | O | GLN | 720 | 95.024 | 3.708 | −16.675 | 1.00 | 36.83 | | O |
| ATOM | 5764 | N | LYS | 721 | 96.826 | 5.008 | −16.291 | 1.00 | 36.83 | | N |
| ATOM | 5765 | CA | LYS | 721 | 97.053 | 4.436 | −14.964 | 1.00 | 36.83 | | C |
| ATOM | 5766 | CB | LYS | 721 | 98.114 | 3.336 | −15.055 | 1.00 | 36.83 | | C |
| ATOM | 5767 | CG | LYS | 721 | 97.706 | 2.190 | −15.992 | 1.00 | 36.83 | | C |
| ATOM | 5768 | CD | LYS | 721 | 96.349 | 1.582 | −15.576 | 1.00 | 36.83 | | C |
| ATOM | 5769 | CE | LYS | 721 | 96.479 | 0.552 | −14.457 | 1.00 | 36.83 | | C |
| ATOM | 5770 | NZ | LYS | 721 | 97.127 | −0.704 | −14.975 | 1.00 | 36.83 | | N |
| ATOM | 5771 | C | LYS | 721 | 97.445 | 5.490 | −13.927 | 1.00 | 36.83 | | C |
| ATOM | 5772 | O | LYS | 721 | 97.531 | 5.204 | −12.721 | 1.00 | 36.83 | | O |
| ATOM | 5773 | N | ALA | 722 | 97.664 | 6.713 | −14.398 | 1.00 | 36.83 | | N |
| ATOM | 5774 | CA | ALA | 722 | 98.028 | 7.822 | −13.519 | 1.00 | 36.83 | | C |
| ATOM | 5775 | CB | ALA | 722 | 98.015 | 9.142 | −14.321 | 1.00 | 36.83 | | C |
| ATOM | 5776 | C | ALA | 722 | 97.078 | 7.932 | −12.319 | 1.00 | 36.83 | | C |
| ATOM | 5777 | O | ALA | 722 | 97.337 | 8.690 | −11.369 | 1.00 | 36.83 | | O |
| ATOM | 5778 | N | THR | 723 | 95.971 | 7.190 | −12.362 | 1.00 | 36.83 | | N |
| ATOM | 5779 | CA | THR | 723 | 94.994 | 7.231 | −11.268 | 1.00 | 36.83 | | C |
| ATOM | 5780 | CB | THR | 723 | 93.604 | 7.666 | −11.782 | 0.00 | 36.83 | | C |
| ATOM | 5781 | OG1 | THR | 723 | 92.673 | 7.681 | −10.693 | 0.00 | 36.83 | | O |
| ATOM | 5782 | CG2 | THR | 723 | 93.107 | 6.707 | −12.853 | 0.00 | 36.83 | | C |
| ATOM | 5783 | C | THR | 723 | 94.853 | 5.876 | −10.573 | 1.00 | 36.83 | | C |
| ATOM | 5784 | O | THR | 723 | 94.391 | 5.803 | −9.416 | 1.00 | 36.83 | | O |
| ATOM | 5785 | N | ASP | 724 | 95.254 | 4.815 | −11.279 | 1.00 | 36.83 | | N |
| ATOM | 5786 | CA | ASP | 724 | 95.175 | 3.454 | −10.751 | 1.00 | 36.83 | | C |
| ATOM | 5787 | CB | ASP | 724 | 95.080 | 2.445 | −11.910 | 1.00 | 36.83 | | C |
| ATOM | 5788 | CG | ASP | 724 | 93.661 | 2.315 | −12.465 | 1.00 | 36.83 | | C |
| ATOM | 5789 | OD1 | ASP | 724 | 93.507 | 2.088 | −13.693 | 1.00 | 36.83 | | O |
| ATOM | 5790 | OD2 | ASP | 724 | 92.692 | 2.430 | −11.672 | 1.00 | 36.83 | | O |
| ATOM | 5791 | C | ASP | 724 | 96.375 | 3.127 | −9.859 | 1.00 | 36.83 | | C |
| ATOM | 5792 | O | ASP | 724 | 96.660 | 1.949 | −9.575 | 1.00 | 36.83 | | O |
| ATOM | 5793 | N | ALA | 725 | 97.071 | 4.168 | −9.414 | 0.00 | 36.83 | | N |
| ATOM | 5794 | CA | ALA | 725 | 98.232 | 4.002 | −8.549 | 0.00 | 36.83 | | C |
| ATOM | 5795 | CB | ALA | 725 | 99.105 | 5.248 | −8.600 | 0.00 | 36.83 | | C |
| ATOM | 5796 | C | ALA | 725 | 97.770 | 3.740 | −7.120 | 0.00 | 36.83 | | C |
| ATOM | 5797 | O | ALA | 725 | 97.994 | 2.660 | −6.573 | 0.00 | 36.83 | | O |
| ATOM | 5798 | N | VAL | 726 | 97.125 | 4.737 | −6.521 | 1.00 | 36.83 | | N |
| ATOM | 5799 | CA | VAL | 726 | 96.621 | 4.615 | −5.159 | 1.00 | 36.83 | | C |
| ATOM | 5800 | CB | VAL | 726 | 97.548 | 5.339 | −4.159 | 0.00 | 36.83 | | C |
| ATOM | 5801 | CG1 | VAL | 726 | 98.935 | 4.720 | −4.195 | 0.00 | 36.83 | | C |
| ATOM | 5802 | CG2 | VAL | 726 | 97.619 | 6.822 | −4.492 | 0.00 | 36.83 | | C |
| ATOM | 5803 | C | VAL | 726 | 95.211 | 5.200 | −5.033 | 1.00 | 36.83 | | C |
| ATOM | 5804 | O | VAL | 726 | 94.817 | 5.647 | −3.954 | 1.00 | 36.83 | | O |
| ATOM | 5805 | N | LEU | 727 | 94.455 | 5.214 | −6.132 | 1.00 | 36.83 | | N |
| ATOM | 5806 | CA | LEU | 727 | 93.092 | 5.744 | −6.099 | 1.00 | 36.83 | | C |
| ATOM | 5807 | CB | LEU | 727 | 92.360 | 5.416 | −7.402 | 0.00 | 36.83 | | C |
| ATOM | 5808 | CG | LEU | 727 | 90.882 | 5.806 | −7.494 | 0.00 | 36.83 | | C |
| ATOM | 5809 | CD1 | LEU | 727 | 90.733 | 7.311 | −7.345 | 0.00 | 36.83 | | C |
| ATOM | 5810 | CD2 | LEU | 727 | 90.317 | 5.344 | −8.828 | 0.00 | 36.83 | | C |
| ATOM | 5811 | C | LEU | 727 | 92.412 | 5.037 | −4.939 | 1.00 | 36.83 | | C |
| ATOM | 5812 | O | LEU | 727 | 91.992 | 5.669 | −3.945 | 1.00 | 36.83 | | O |
| ATOM | 5813 | N | LYS | 728 | 92.339 | 3.711 | −5.064 | 1.00 | 36.83 | | N |
| ATOM | 5814 | CA | LYS | 728 | 91.743 | 2.868 | −4.036 | 1.00 | 36.83 | | C |
| ATOM | 5815 | CB | LYS | 728 | 91.505 | 1.457 | −4.583 | 0.00 | 36.83 | | C |
| ATOM | 5816 | CG | LYS | 728 | 92.756 | 0.781 | −5.126 | 0.00 | 36.83 | | C |
| ATOM | 5817 | CD | LYS | 728 | 92.463 | −0.631 | −5.603 | 0.00 | 36.83 | | C |
| ATOM | 5818 | CE | LYS | 728 | 93.715 | −1.299 | −6.149 | 0.00 | 36.83 | | C |
| ATOM | 5819 | NZ | LYS | 728 | 94.791 | −1.392 | −5.123 | 0.00 | 36.83 | | N |
| ATOM | 5820 | C | LYS | 728 | 92.700 | 2.814 | −2.847 | 1.00 | 36.83 | | C |
| ATOM | 5821 | O | LYS | 728 | 93.085 | 1.723 | −2.381 | 1.00 | 36.83 | | O |
| ATOM | 5822 | N | HIS | 729 | 93.092 | 3.993 | −2.365 | 1.00 | 36.83 | | N |
| ATOM | 5823 | CA | HIS | 729 | 94.002 | 4.082 | −1.229 | 1.00 | 36.83 | | C |
| ATOM | 5824 | CB | HIS | 729 | 95.190 | 4.986 | −1.565 | 1.00 | 36.83 | | C |
| ATOM | 5825 | CG | HIS | 729 | 96.418 | 4.699 | −0.755 | 1.00 | 36.83 | | C |
| ATOM | 5826 | CD2 | HIS | 729 | 96.583 | 4.024 | 0.410 | 1.00 | 36.83 | | C |
| ATOM | 5827 | ND1 | HIS | 729 | 97.674 | 5.123 | −1.138 | 1.00 | 36.83 | | N |
| ATOM | 5828 | CE1 | HIS | 729 | 98.560 | 4.719 | −0.241 | 1.00 | 36.83 | | C |
| ATOM | 5829 | NE2 | HIS | 729 | 97.925 | 4.053 | 0.708 | 1.00 | 36.83 | | N |
| ATOM | 5830 | C | HIS | 729 | 93.247 | 4.636 | −0.034 | 1.00 | 36.83 | | C |
| ATOM | 5831 | O | HIS | 729 | 93.780 | 4.701 | 1.086 | 1.00 | 36.83 | | O |
| ATOM | 5832 | N | LEU | 730 | 91.997 | 5.020 | −0.285 | 1.00 | 36.83 | | N |
| ATOM | 5833 | CA | LEU | 730 | 91.111 | 5.565 | 0.747 | 1.00 | 36.83 | | C |
| ATOM | 5834 | CB | LEU | 730 | 90.688 | 6.990 | 0.381 | 0.00 | 36.83 | | C |
| ATOM | 5835 | CG | LEU | 730 | 91.806 | 8.014 | 0.165 | 0.00 | 36.83 | | C |
| ATOM | 5836 | CD1 | LEU | 730 | 91.206 | 9.338 | −0.282 | 0.00 | 36.83 | | C |
| ATOM | 5837 | CD2 | LEU | 730 | 92.600 | 8.190 | 1.449 | 0.00 | 36.83 | | C |
| ATOM | 5838 | C | LEU | 730 | 89.865 | 4.667 | 0.856 | 1.00 | 36.83 | | C |
| ATOM | 5839 | O | LEU | 730 | 88.945 | 4.936 | 1.643 | 1.00 | 36.83 | | O |
| ATOM | 5840 | N | ASN | 731 | 89.852 | 3.602 | 0.058 | 0.00 | 36.83 | | N |
| ATOM | 5841 | CA | ASN | 731 | 88.747 | 2.647 | 0.032 | 0.00 | 36.83 | | C |
| ATOM | 5842 | CB | ASN | 731 | 88.338 | 2.260 | 1.457 | 0.00 | 36.83 | | C |
| ATOM | 5843 | CG | ASN | 731 | 89.477 | 1.639 | 2.241 | 0.00 | 36.83 | | C |
| ATOM | 5844 | OD1 | ASN | 731 | 90.016 | 0.601 | 1.858 | 0.00 | 36.83 | | O |
| ATOM | 5845 | ND2 | ASN | 731 | 89.848 | 2.273 | 3.347 | 0.00 | 36.83 | | N |
| ATOM | 5846 | C | ASN | 731 | 87.537 | 3.194 | −0.722 | 0.00 | 36.83 | | C |
| ATOM | 5847 | O | ASN | 731 | 86.433 | 2.659 | −0.612 | 0.00 | 36.83 | | O |
| ATOM | 5848 | N | ILE | 732 | 87.751 | 4.261 | −1.486 | 0.00 | 36.83 | | N |
| ATOM | 5849 | CA | ILE | 732 | 86.681 | 4.872 | −2.271 | 0.00 | 36.83 | | C |
| ATOM | 5850 | CB | ILE | 732 | 87.052 | 6.307 | −2.713 | 0.00 | 36.83 | | C |
| ATOM | 5851 | CG2 | ILE | 732 | 85.897 | 6.923 | −3.489 | 0.00 | 36.83 | | C |
| ATOM | 5852 | CG1 | ILE | 732 | 87.393 | 7.167 | −1.494 | 0.00 | 36.83 | | C |
| ATOM | 5853 | CD1 | ILE | 732 | 87.867 | 8.575 | −1.845 | 1.00 | 36.83 | | C |
| ATOM | 5854 | C | ILE | 732 | 86.470 | 4.030 | −3.526 | 0.00 | 36.83 | | C |
| ATOM | 5855 | O | ILE | 732 | 87.439 | 3.615 | −4.162 | 0.00 | 36.83 | | O |
| ATOM | 5856 | N | ASP | 733 | 85.215 | 3.775 | −3.889 | 1.00 | 36.83 | | N |
| ATOM | 5857 | CA | ASP | 733 | 84.953 | 2.979 | −5.086 | 1.00 | 36.83 | | C |
| ATOM | 5858 | CB | ASP | 733 | 84.290 | 1.656 | −4.689 | 1.00 | 36.83 | | C |
| ATOM | 5859 | CG | ASP | 733 | 83.558 | 1.745 | −3.365 | 1.00 | 36.83 | | C |
| ATOM | 5860 | OD1 | ASP | 733 | 84.218 | 1.602 | −2.306 | 1.00 | 36.83 | | O |
| ATOM | 5861 | OD2 | ASP | 733 | 82.326 | 1.974 | −3.391 | 1.00 | 36.83 | | O |
| ATOM | 5862 | C | ASP | 733 | 84.146 | 3.682 | −6.210 | 1.00 | 36.83 | | C |
| ATOM | 5863 | O | ASP | 733 | 82.895 | 3.717 | −6.204 | 1.00 | 36.83 | | O |
| ATOM | 5864 | N | PRO | 734 | 84.865 | 4.250 | −7.196 | 1.00 | 36.83 | | N |
| ATOM | 5865 | CD | PRO | 734 | 86.304 | 4.571 | −7.059 | 1.00 | 36.83 | | C |
| ATOM | 5866 | CA | PRO | 734 | 84.280 | 4.959 | −8.345 | 1.00 | 36.83 | | C |
| ATOM | 5867 | CB | PRO | 734 | 85.354 | 5.990 | −8.691 | 1.00 | 36.83 | | C |
| ATOM | 5868 | CG | PRO | 734 | 86.631 | 5.228 | −8.403 | 1.00 | 36.83 | | C |
| ATOM | 5869 | C | PRO | 734 | 83.892 | 4.128 | −9.583 | 1.00 | 36.83 | | C |
| ATOM | 5870 | O | PRO | 734 | 84.765 | 3.614 | −10.302 | 1.00 | 36.83 | | O |
| ATOM | 5871 | N | GLU | 735 | 82.584 | 4.018 | −9.829 | 1.00 | 36.83 | | N |
| ATOM | 5872 | CA | GLU | 735 | 82.059 | 3.313 | −11.011 | 1.00 | 36.83 | | C |
| ATOM | 5873 | CB | GLU | 735 | 81.027 | 2.251 | −10.611 | 1.00 | 36.83 | | C |
| ATOM | 5874 | CG | GLU | 735 | 80.699 | 1.261 | −11.737 | 1.00 | 36.83 | | C |
| ATOM | 5875 | CD | GLU | 735 | 79.670 | 0.228 | −11.321 | 0.00 | 36.83 | | C |
| ATOM | 5876 | OE1 | GLU | 735 | 79.936 | −0.525 | −10.361 | 0.00 | 36.83 | | O |
| ATOM | 5877 | OE2 | GLU | 735 | 78.596 | 0.169 | −11.955 | 0.00 | 36.83 | | O |
| ATOM | 5878 | C | GLU | 735 | 81.404 | 4.394 | −11.895 | 1.00 | 36.83 | | C |
| ATOM | 5879 | O | GLU | 735 | 80.649 | 4.116 | −12.847 | 1.00 | 36.83 | | O |
| ATOM | 5880 | N | GLN | 736 | 81.712 | 5.644 | −11.554 | 1.00 | 36.83 | | N |
| ATOM | 5881 | CA | GLN | 736 | 81.217 | 6.787 | −12.297 | 1.00 | 36.83 | | C |
| ATOM | 5882 | CB | GLN | 736 | 81.407 | 8.063 | −11.474 | 1.00 | 36.83 | | C |
| ATOM | 5883 | CG | GLN | 736 | 82.876 | 8.446 | −11.317 | 1.00 | 36.83 | | C |
| ATOM | 5884 | CD | GLN | 736 | 83.258 | 9.639 | −12.167 | 1.00 | 36.83 | | C |
| ATOM | 5885 | OE1 | GLN | 736 | 83.086 | 10.792 | −11.744 | 1.00 | 36.83 | | O |
| ATOM | 5886 | NE2 | GLN | 736 | 83.766 | 9.380 | −13.379 | 1.00 | 36.83 | | N |
| ATOM | 5887 | C | GLN | 736 | 82.023 | 6.886 | −13.602 | 1.00 | 36.83 | | C |
| ATOM | 5888 | O | GLN | 736 | 81.460 | 7.080 | −14.683 | 1.00 | 36.83 | | O |
| ATOM | 5889 | N | TYR | 737 | 83.338 | 6.741 | −13.521 | 1.00 | 36.83 | | N |
| ATOM | 5890 | CA | TYR | 737 | 84.147 | 6.853 | −14.732 | 1.00 | 36.83 | | C |
| ATOM | 5891 | CB | TYR | 737 | 85.628 | 7.071 | −14.367 | 1.00 | 36.83 | | C |
| ATOM | 5892 | CG | TYR | 737 | 86.369 | 5.881 | −13.764 | 1.00 | 36.83 | | C |
| ATOM | 5893 | CD1 | TYR | 737 | 86.487 | 4.671 | −14.456 | 1.00 | 36.83 | | C |
| ATOM | 5894 | CE1 | TYR | 737 | 87.251 | 3.603 | −13.940 | 1.00 | 36.83 | | C |
| ATOM | 5895 | CD2 | TYR | 737 | 87.025 | 6.001 | −12.533 | 1.00 | 36.83 | | C |
| ATOM | 5896 | CE2 | TYR | 737 | 87.798 | 4.941 | −12.001 | 1.00 | 36.83 | | C |
| ATOM | 5897 | CZ | TYR | 737 | 87.907 | 3.748 | −12.713 | 1.00 | 36.83 | | C |
| ATOM | 5898 | OH | TYR | 737 | 88.680 | 2.716 | −12.201 | 1.00 | 36.83 | | O |
| ATOM | 5899 | C | TYR | 737 | 84.016 | 5.661 | −15.664 | 1.00 | 36.83 | | C |
| ATOM | 5900 | O | TYR | 737 | 83.383 | 4.666 | −15.318 | 1.00 | 36.83 | | O |
| ATOM | 5901 | N | ARG | 738 | 84.615 | 5.766 | −16.851 | 1.00 | 36.83 | | N |
| ATOM | 5902 | CA | ARG | 738 | 84.596 | 4.669 | −17.815 | 1.00 | 36.83 | | C |
| ATOM | 5903 | CB | ARG | 738 | 83.554 | 4.906 | −18.902 | 1.00 | 36.83 | | C |
| ATOM | 5904 | CG | ARG | 738 | 82.802 | 3.654 | −19.302 | 1.00 | 36.83 | | C |
| ATOM | 5905 | CD | ARG | 738 | 81.325 | 3.863 | −19.038 | 1.00 | 36.83 | | C |
| ATOM | 5906 | NE | ARG | 738 | 81.065 | 4.232 | −17.647 | 1.00 | 36.83 | | N |
| ATOM | 5907 | CZ | ARG | 738 | 80.643 | 3.373 | −16.725 | 1.00 | 36.83 | | C |
| ATOM | 5908 | NH1 | ARG | 738 | 80.428 | 3.780 | −15.477 | 1.00 | 36.83 | | N |
| ATOM | 5909 | NH2 | ARG | 738 | 80.429 | 2.103 | −17.058 | 1.00 | 36.83 | | N |
| ATOM | 5910 | C | ARG | 738 | 85.972 | 4.555 | −18.463 | 1.00 | 36.83 | | C |
| ATOM | 5911 | O | ARG | 738 | 86.987 | 4.954 | −17.874 | 1.00 | 36.83 | | O |
| ATOM | 5912 | N | PHE | 739 | 86.028 | 4.012 | −19.675 | 1.00 | 36.83 | | N |
| ATOM | 5913 | CA | PHE | 739 | 87.326 | 3.894 | −20.325 | 1.00 | 36.83 | | C |
| ATOM | 5914 | CB | PHE | 739 | 87.527 | 2.491 | −20.906 | 1.00 | 36.83 | | C |
| ATOM | 5915 | CG | PHE | 739 | 88.862 | 1.891 | −20.555 | 1.00 | 36.83 | | C |
| ATOM | 5916 | CD1 | PHE | 739 | 90.025 | 2.657 | −20.658 | 1.00 | 36.83 | | C |
| ATOM | 5917 | CD2 | PHE | 739 | 88.962 | 0.569 | −20.120 | 1.00 | 36.83 | | C |
| ATOM | 5918 | CE1 | PHE | 739 | 91.282 | 2.116 | −20.330 | 1.00 | 36.83 | | C |
| ATOM | 5919 | CE2 | PHE | 739 | 90.202 | 0.016 | −19.791 | 1.00 | 36.83 | | C |
| ATOM | 5920 | CZ | PHE | 739 | 91.369 | 0.792 | −19.896 | 1.00 | 36.83 | | C |
| ATOM | 5921 | C | PHE | 739 | 87.528 | 4.933 | −21.410 | 1.00 | 36.83 | | C |
| ATOM | 5922 | O | PHE | 739 | 87.320 | 6.138 | −21.173 | 1.00 | 36.83 | | O |
| ATOM | 5923 | N | GLY | 740 | 87.942 | 4.467 | −22.590 | 1.00 | 36.83 | | N |
| ATOM | 5924 | CA | GLY | 740 | 88.187 | 5.351 | −23.716 | 1.00 | 36.83 | | C |
| ATOM | 5925 | C | GLY | 740 | 89.333 | 4.862 | −24.590 | 1.00 | 36.83 | | C |
| ATOM | 5926 | O | GLY | 740 | 90.517 | 5.020 | −24.238 | 1.00 | 36.83 | | O |
| ATOM | 5927 | N | ILE | 741 | 88.985 | 4.275 | −25.736 | 1.00 | 36.83 | | N |
| ATOM | 5928 | CA | ILE | 741 | 89.970 | 3.748 | −26.671 | 1.00 | 36.83 | | C |
| ATOM | 5929 | CB | ILE | 741 | 89.364 | 3.537 | −28.069 | 1.00 | 36.83 | | C |
| ATOM | 5930 | CG2 | ILE | 741 | 88.987 | 4.866 | −28.648 | 1.00 | 36.83 | | C |
| ATOM | 5931 | CG1 | ILE | 741 | 90.380 | 2.854 | −29.006 | 1.00 | 36.83 | | C |
| ATOM | 5932 | CD1 | ILE | 741 | 90.830 | 1.433 | −28.578 | 1.00 | 36.83 | | C |
| ATOM | 5933 | C | ILE | 741 | 91.134 | 4.717 | −26.794 | 1.00 | 36.83 | | C |
| ATOM | 5934 | O | ILE | 741 | 92.244 | 4.327 | −27.182 | 1.00 | 36.83 | | O |
| ATOM | 5935 | N | THR | 742 | 90.874 | 5.983 | −26.466 | 1.00 | 36.83 | | N |
| ATOM | 5936 | CA | THR | 742 | 91.902 | 7.016 | −26.535 | 1.00 | 36.83 | | C |
| ATOM | 5937 | CB | THR | 742 | 91.929 | 7.675 | −27.904 | 1.00 | 36.83 | | C |
| ATOM | 5938 | OG1 | THR | 742 | 91.041 | 6.968 | −28.772 | 1.00 | 36.83 | | O |
| ATOM | 5939 | CG2 | THR | 742 | 93.345 | 7.664 | −28.488 | 1.00 | 36.83 | | C |
| ATOM | 5940 | C | THR | 742 | 91.671 | 8.125 | −25.525 | 1.00 | 36.83 | | C |
| ATOM | 5941 | O | THR | 742 | 92.400 | 9.125 | −25.540 | 1.00 | 36.83 | | O |
| ATOM | 5942 | N | LYS | 743 | 90.667 | 7.976 | −24.660 | 1.00 | 36.83 | | N |
| ATOM | 5943 | CA | LYS | 743 | 90.395 | 9.025 | −23.679 | 1.00 | 36.83 | | C |
| ATOM | 5944 | CB | LYS | 743 | 89.452 | 10.067 | −24.301 | 1.00 | 36.83 | | C |
| ATOM | 5945 | CG | LYS | 743 | 89.892 | 10.510 | −25.682 | 1.00 | 36.83 | | C |
| ATOM | 5946 | CD | LYS | 743 | 88.790 | 10.304 | −26.703 | 1.00 | 36.83 | | C |
| ATOM | 5947 | CE | LYS | 743 | 87.855 | 11.524 | −26.758 | 1.00 | 36.83 | | C |
| ATOM | 5948 | NZ | LYS | 743 | 87.274 | 11.866 | −25.412 | 1.00 | 36.83 | | N |
| ATOM | 5949 | C | LYS | 743 | 89.797 | 8.472 | −22.389 | 1.00 | 36.83 | | C |
| ATOM | 5950 | O | LYS | 743 | 89.410 | 7.303 | −22.337 | 1.00 | 36.83 | | O |
| ATOM | 5951 | N | ILE | 744 | 89.690 | 9.317 | −21.364 | 1.00 | 36.83 | | N |
| ATOM | 5952 | CA | ILE | 744 | 89.145 | 8.878 | −20.078 | 1.00 | 36.83 | | C |
| ATOM | 5953 | CB | ILE | 744 | 90.311 | 8.761 | −19.023 | 1.00 | 36.83 | | C |
| ATOM | 5954 | CG2 | ILE | 744 | 90.852 | 10.135 | −18.658 | 1.00 | 36.83 | | C |
| ATOM | 5955 | CG1 | ILE | 744 | 89.833 | 7.977 | −17.809 | 1.00 | 36.83 | | C |
| ATOM | 5956 | CD1 | ILE | 744 | 89.283 | 6.611 | −18.192 | 1.00 | 36.83 | | C |
| ATOM | 5957 | C | ILE | 744 | 87.968 | 9.731 | −19.516 | 1.00 | 36.83 | | C |
| ATOM | 5958 | O | ILE | 744 | 88.151 | 10.614 | −18.676 | 1.00 | 36.83 | | O |
| ATOM | 5959 | N | PHE | 745 | 86.750 | 9.426 | −19.964 | 1.00 | 36.83 | | N |
| ATOM | 5960 | CA | PHE | 745 | 85.545 | 10.155 | −19.538 | 1.00 | 36.83 | | C |
| ATOM | 5961 | CB | PHE | 745 | 84.322 | 9.655 | −20.325 | 1.00 | 36.83 | | C |
| ATOM | 5962 | CG | PHE | 745 | 84.467 | 9.739 | −21.820 | 1.00 | 36.83 | | C |
| ATOM | 5963 | CD1 | PHE | 745 | 85.435 | 8.990 | −22.486 | 1.00 | 36.83 | | C |
| ATOM | 5964 | CD2 | PHE | 745 | 83.618 | 10.558 | −22.566 | 1.00 | 36.83 | | C |
| ATOM | 5965 | CE1 | PHE | 745 | 85.563 | 9.053 | −23.883 | 1.00 | 36.83 | | C |
| ATOM | 5966 | CE2 | PHE | 745 | 83.729 | 10.634 | −23.962 | 1.00 | 36.83 | | C |
| ATOM | 5967 | CZ | PHE | 745 | 84.705 | 9.881 | −24.624 | 1.00 | 36.83 | | C |
| ATOM | 5968 | C | PHE | 745 | 85.212 | 10.065 | −18.040 | 1.00 | 36.83 | | C |
| ATOM | 5969 | O | PHE | 745 | 85.008 | 8.976 | −17.503 | 1.00 | 36.83 | | O |
| ATOM | 5970 | N | PHE | 746 | 85.125 | 11.207 | −17.365 | 1.00 | 36.83 | | N |
| ATOM | 5971 | CA | PHE | 746 | 84.763 | 11.192 | −15.949 | 1.00 | 36.83 | | C |
| ATOM | 5972 | CB | PHE | 746 | 85.947 | 11.648 | −15.081 | 0.00 | 36.83 | | C |
| ATOM | 5973 | CG | PHE | 746 | 86.257 | 13.114 | −15.182 | 0.00 | 36.83 | | C |
| ATOM | 5974 | CD1 | PHE | 746 | 86.639 | 13.681 | −16.391 | 0.00 | 36.83 | | C |
| ATOM | 5975 | CD2 | PHE | 746 | 86.168 | 13.930 | −14.058 | 0.00 | 36.83 | | C |
| ATOM | 5976 | CE1 | PHE | 746 | 86.929 | 15.039 | −16.480 | 0.00 | 36.83 | | C |
| ATOM | 5977 | CE2 | PHE | 746 | 86.456 | 15.290 | −14.137 | 0.00 | 36.83 | | C |
| ATOM | 5978 | CZ | PHE | 746 | 86.837 | 15.845 | −15.351 | 0.00 | 36.83 | | C |
| ATOM | 5979 | C | PHE | 746 | 83.510 | 12.036 | −15.636 | 1.00 | 36.83 | | C |
| ATOM | 5980 | O | PHE | 746 | 83.552 | 13.280 | −15.626 | 1.00 | 36.83 | | O |
| ATOM | 5981 | N | ARG | 747 | 82.400 | 11.343 | −15.382 | 1.00 | 36.83 | | N |
| ATOM | 5982 | CA | ARG | 747 | 81.119 | 11.976 | −15.051 | 1.00 | 36.83 | | C |
| ATOM | 5983 | CB | ARG | 747 | 80.205 | 10.986 | −14.315 | 1.00 | 36.83 | | C |
| ATOM | 5984 | CG | ARG | 747 | 79.847 | 9.702 | −15.048 | 1.00 | 36.83 | | C |
| ATOM | 5985 | CD | ARG | 747 | 79.175 | 8.729 | −14.087 | 1.00 | 36.83 | | C |
| ATOM | 5986 | NE | ARG | 747 | 78.613 | 7.569 | −14.784 | 1.00 | 36.83 | | N |
| ATOM | 5987 | CZ | ARG | 747 | 77.340 | 7.469 | −15.151 | 1.00 | 36.83 | | C |
| ATOM | 5988 | NH1 | ARG | 747 | 76.901 | 6.388 | −15.788 | 1.00 | 36.83 | | N |
| ATOM | 5989 | NH2 | ARG | 747 | 76.497 | 8.449 | −14.859 | 1.00 | 36.83 | | N |
| ATOM | 5990 | C | ARG | 747 | 81.272 | 13.201 | −14.142 | 1.00 | 36.83 | | C |
| ATOM | 5991 | O | ARG | 747 | 82.395 | 13.609 | −13.780 | 1.00 | 36.83 | | O |
| ATOM | 5992 | N | ALA | 748 | 80.125 | 13.764 | −13.761 | 1.00 | 36.83 | | N |
| ATOM | 5993 | CA | ALA | 748 | 80.087 | 14.904 | −12.852 | 1.00 | 36.83 | | C |
| ATOM | 5994 | CB | ALA | 748 | 79.111 | 15.967 | −13.351 | 1.00 | 36.83 | | C |
| ATOM | 5995 | C | ALA | 748 | 79.621 | 14362 | −11.504 | 1.00 | 36.83 | | C |
| ATOM | 5996 | O | ALA | 748 | 79.651 | 13.146 | −11.278 | 1.00 | 36.83 | | O |
| ATOM | 5997 | N | GLY | 749 | 79.183 | 15.257 | −10.623 | 0.00 | 36.83 | | N |
| ATOM | 5998 | CA | GLY | 749 | 78.716 | 14.839 | −9.314 | 0.00 | 36.83 | | C |
| ATOM | 5999 | C | GLY | 749 | 78.141 | 15.981 | −8.498 | 0.00 | 36.83 | | C |
| ATOM | 6000 | O | GLY | 749 | 78.584 | 17.124 | −8.618 | 0.00 | 36.83 | | O |
| ATOM | 6001 | N | GLN | 750 | 77.149 | 15.672 | −7.668 | 0.00 | 36.83 | | N |
| ATOM | 6002 | CA | GLN | 750 | 76.511 | 16.676 | −6.823 | 0.00 | 36.83 | | C |
| ATOM | 6003 | CB | GLN | 750 | 75.204 | 16.122 | −6.245 | 0.00 | 36.83 | | C |
| ATOM | 6004 | CG | GLN | 750 | 75.364 | 14.825 | −5.465 | 0.00 | 36.83 | | C |
| ATOM | 6005 | CD | GLN | 750 | 74.060 | 14.347 | −4.858 | 0.00 | 36.83 | | C |
| ATOM | 6006 | OE1 | GLN | 750 | 73.441 | 15.048 | −4.058 | 0.00 | 36.83 | | O |
| ATOM | 6007 | NE2 | GLN | 750 | 73.636 | 13.146 | −5.235 | 0.00 | 36.83 | | N |
| ATOM | 6008 | C | GLN | 750 | 77.448 | 17.090 | −5.690 | 0.00 | 36.83 | | C |
| ATOM | 6009 | O | GLN | 750 | 78.610 | 17.420 | −5.930 | 0.00 | 36.83 | | O |
| ATOM | 6010 | N | LEU | 751 | 76.939 | 17.077 | −4.462 | 0.00 | 36.83 | | N |
| ATOM | 6011 | CA | LEU | 751 | 77.738 | 17.443 | −3.298 | 0.00 | 36.83 | | C |
| ATOM | 6012 | CB | LEU | 751 | 76.985 | 17.102 | −2.010 | 0.00 | 36.83 | | C |
| ATOM | 6013 | CG | LEU | 751 | 75.639 | 17.798 | −1.791 | 0.00 | 36.83 | | C |
| ATOM | 6014 | CD1 | LEU | 751 | 75.000 | 17.282 | −0.512 | 0.00 | 36.83 | | C |
| ATOM | 6015 | CD2 | LEU | 751 | 75.843 | 19.303 | −1.720 | 0.00 | 36.83 | | C |
| ATOM | 6016 | C | LEU | 751 | 79.062 | 16.691 | −3.333 | 0.00 | 36.83 | | C |
| ATOM | 6017 | O | LEU | 751 | 79.094 | 15.490 | −3.601 | 0.00 | 36.83 | | O |
| ATOM | 6018 | N | ALA | 752 | 80.153 | 17.400 | −3.064 | 1.00 | 36.83 | | N |
| ATOM | 6019 | CA | ALA | 752 | 81.472 | 16.786 | −3.083 | 1.00 | 36.83 | | C |
| ATOM | 6020 | CB | ALA | 752 | 82.140 | 17.017 | −4.451 | 1.00 | 36.83 | | C |
| ATOM | 6021 | C | ALA | 752 | 82.371 | 17.314 | −1.975 | 1.00 | 36.83 | | C |
| ATOM | 6022 | O | ALA | 752 | 82.282 | 18.490 | −1.584 | 1.00 | 36.83 | | O |
| ATOM | 6023 | N | ARG | 753 | 83.244 | 16.432 | −1.481 | 1.00 | 36.83 | | N |
| ATOM | 6024 | CA | ARG | 753 | 84.184 | 16.773 | −0.417 | 1.00 | 36.83 | | C |
| ATOM | 6025 | CB | ARG | 753 | 84.453 | 15.548 | 0.455 | 1.00 | 36.83 | | C |
| ATOM | 6026 | CG | ARG | 753 | 83.298 | 15.112 | 1.334 | 1.00 | 36.83 | | C |
| ATOM | 6027 | CD | ARG | 753 | 83.638 | 13.758 | 1.949 | 1.00 | 36.83 | | C |
| ATOM | 6028 | NE | ARG | 753 | 85.085 | 13.545 | 1.983 | 1.00 | 36.83 | | N |
| ATOM | 6029 | CZ | ARG | 753 | 85.675 | 12.457 | 2.480 | 1.00 | 36.83 | | C |
| ATOM | 6030 | NH1 | ARG | 753 | 87.004 | 12.351 | 2.464 | 1.00 | 36.83 | | N |
| ATOM | 6031 | NH2 | ARG | 753 | 84.943 | 11.478 | 3.001 | 1.00 | 36.83 | | N |
| ATOM | 6032 | C | ARG | 753 | 85.512 | 17.262 | −0.990 | 1.00 | 36.83 | | C |
| ATOM | 6033 | O | ARG | 753 | 85.867 | 18.445 | −0.872 | 1.00 | 36.83 | | O |
| ATOM | 6034 | N | ILE | 754 | 86.245 | 16.329 | −1.598 | 1.00 | 36.83 | | N |
| ATOM | 6035 | CA | ILE | 754 | 87.546 | 16.612 | −2.196 | 1.00 | 36.83 | | C |
| ATOM | 6036 | CB | ILE | 754 | 88.680 | 16.359 | −1.165 | 1.00 | 36.83 | | C |
| ATOM | 6037 | CG2 | ILE | 754 | 90.054 | 16.667 | −1.793 | 1.00 | 36.83 | | C |
| ATOM | 6038 | CG1 | ILE | 754 | 88.426 | 17.224 | 0.084 | 1.00 | 36.83 | | C |
| ATOM | 6039 | CD1 | ILE | 754 | 89.580 | 17.269 | 1.102 | 1.00 | 36.83 | | C |
| ATOM | 6040 | C | ILE | 754 | 87.709 | 15.715 | −3.427 | 1.00 | 36.83 | | C |
| ATOM | 6041 | O | ILE | 754 | 88.655 | 14.924 | −3.536 | 1.00 | 36.83 | | O |
| ATOM | 6042 | N | LEU | 755 | 86.765 | 15.857 | −4.358 | 1.00 | 36.83 | | N |
| ATOM | 6043 | CA | LEU | 755 | 86.745 | 15.070 | −5.589 | 1.00 | 36.83 | | C |
| ATOM | 6044 | CB | LEU | 755 | 85.429 | 14.276 | −5.690 | 1.00 | 36.83 | | C |
| ATOM | 6045 | CG | LEU | 755 | 85.338 | 13.226 | −6.812 | 1.00 | 36.83 | | C |
| ATOM | 6046 | CD1 | LEU | 755 | 86.490 | 12.241 | −6.666 | 1.00 | 36.83 | | C |
| ATOM | 6047 | CD2 | LEU | 755 | 83.999 | 12.489 | −6.756 | 1.00 | 36.83 | | C |
| ATOM | 6048 | C | LEU | 755 | 86.881 | 15.987 | −6.795 | 1.00 | 36.83 | | C |
| ATOM | 6049 | O | LEU | 755 | 87.724 | 15.672 | −7.677 | 1.00 | 36.83 | | O |
| ATOM | 6050 | OXT | LEU | 755 | 86.136 | 17.003 | −6.843 | 1.00 | 36.83 | | O |
| ATOM | 6051 | C1 | h79 A | 1 | 71.267 | 45.220 | −46.141 | 1.00 | 20.00 | | C |
| ATOM | 6052 | C2 | h79 A | 1 | 70.883 | 45.620 | −44.891 | 1.00 | 20.00 | | C |
| ATOM | 6053 | C3 | h79 A | 1 | 69.931 | 46.575 | −44.752 | 1.00 | 20.00 | | C |
| ATOM | 6054 | C4 | h79 A | 1 | 69.391 | 47.159 | −45.868 | 1.00 | 20.00 | | C |
| ATOM | 6055 | C5 | h79 A | 1 | 69.737 | 46.806 | −47.157 | 1.00 | 20.00 | | C |
| ATOM | 6056 | C6 | h79 A | 1 | 70.702 | 45.794 | −47.316 | 1.00 | 20.00 | | C |
| ATOM | 6057 | N7 | h79 A | 1 | 68.454 | 48.110 | −45.957 | 1.00 | 20.00 | | N |
| ATOM | 6058 | C8 | h79 A | 1 | 68.181 | 48.370 | −47.229 | 1.00 | 20.00 | | C |
| ATOM | 6059 | C9 | h79 A | 1 | 68.966 | 47.596 | −48.040 | 1.00 | 20.00 | | C |
| ATOM | 6060 | C10 | h79 A | 1 | 67.298 | 49.263 | −47.706 | 1.00 | 20.00 | | C |
| ATOM | 6061 | C11 | h79 A | 1 | 67.126 | 49.458 | −49.066 | 1.00 | 20.00 | | C |
| ATOM | 6062 | C12 | h79 A | 1 | 67.869 | 48.703 | −49.934 | 1.00 | 20.00 | | C |
| ATOM | 6063 | C13 | h79 A | 1 | 68.775 | 47.778 | −49.443 | 1.00 | 20.00 | | C |
| ATOM | 6064 | BR14 | h79 A | 1 | 72.589 | 43.876 | −46.053 | 1.00 | 20.00 | | BR |
| ATOM | 6065 | BR15 | h79 A | 1 | 69.597 | 46.982 | −50.933 | 1.00 | 20.00 | | BR |
| ATOM | 6066 | BR16 | h79 A | 1 | 67.656 | 48.831 | −51.824 | 1.00 | 20.00 | | BR |
| ATOM | 6067 | O17 | h79 A | 1 | 66.641 | 49.933 | −46.741 | 1.00 | 20.00 | | O |
| ATOM | 6068 | C31 | AMV B | 1001 | 64.294 | 42.627 | −16.924 | 1.00 | 23.77 | | C |
| ATOM | 6069 | N30 | AMV B | 1001 | 64.160 | 43.518 | −15.948 | 1.00 | 27.47 | | N |
| ATOM | 6070 | C29 | AMV B | 1001 | 64.981 | 43.511 | −14.934 | 1.00 | 27.85 | | C |
| ATOM | 6071 | N28 | AMV B | 1001 | 65.949 | 42.628 | −14.841 | 1.00 | 25.39 | | N |
| ATOM | 6072 | C26 | AMV B | 1001 | 66.130 | 41.693 | −15.761 | 1.00 | 23.46 | | C |
| ATOM | 6073 | C25 | AMV B | 1001 | 65.289 | 41.676 | −16.847 | 1.00 | 22.61 | | C |
| ATOM | 6074 | N27 | AMV B | 1001 | 67.111 | 40.811 | −15.598 | 1.00 | 30.29 | | N |
| ATOM | 6075 | N24 | AMV B | 1001 | 65.187 | 40.913 | −17.912 | 1.00 | 22.91 | | N |
| ATOM | 6076 | N22 | AMV B | 1001 | 63.625 | 42.421 | −18.025 | 1.00 | 22.13 | | N |
| ATOM | 6077 | C23 | AMV B | 1001 | 64.179 | 41.389 | −18.618 | 1.00 | 22.95 | | C |
| ATOM | 6078 | C21 | AMV B | 1001 | 62.457 | 43.201 | −18.468 | 1.00 | 20.51 | | C |
| ATOM | 6079 | C19 | AMV B | 1001 | 62.793 | 44.586 | −18.958 | 1.00 | 23.23 | | C |
| ATOM | 6080 | C17 | AMV B | 1001 | 62.732 | 44.475 | −20.449 | 1.00 | 19.65 | | C |
| ATOM | 6081 | C15 | AMV B | 1001 | 61.687 | 43.430 | −20.651 | 1.00 | 15.03 | | C |
| ATOM | 6082 | O16 | AMV B | 1001 | 61.727 | 42.613 | −19.489 | 1.00 | 17.90 | | O |
| ATOM | 6083 | O20 | AMV B | 1001 | 61.748 | 45.411 | −18.554 | 1.00 | 36.85 | | O |
| ATOM | 6084 | O18 | AMV B | 1001 | 62.476 | 45.678 | −21.141 | 1.00 | 17.93 | | O |
| ATOM | 6085 | C14 | AMV B | 1001 | 62.026 | 42.628 | −21.900 | 1.00 | 9.23 | | C |
| ATOM | 6086 | O13 | AMV B | 1001 | 63.360 | 42.127 | −21.939 | 1.00 | 3.48 | | O |
| ATOM | 6087 | P9 | AMV B | 1001 | 64.171 | 41.989 | −23.234 | 1.00 | 0.00 | | P |
| ATOM | 6088 | O10 | AMV B | 1001 | 65.456 | 41.569 | −22.814 | 1.00 | 11.17 | | O |
| ATOM | 6089 | O11 | AMV B | 1001 | 64.071 | 43.229 | −23.891 | 1.00 | 0.00 | | O |
| ATOM | 6090 | O12 | AMV B | 1001 | 63.500 | 40.823 | −24.038 | 1.00 | 2.48 | | O |
| ATOM | 6091 | P5 | AMV B | 1001 | 64.037 | 40.125 | −25.340 | 1.00 | 7.43 | | P |
| ATOM | 6092 | O8 | AMV B | 1001 | 62.819 | 40.326 | −26.253 | 1.00 | 10.35 | | O |
| ATOM | 6093 | V | AMV B | 1001 | 62.699 | 40.575 | −28.314 | 1.00 | 125.83 | | V |
| ATOM | 6094 | O7 | AMV B | 1001 | 64.146 | 38.708 | −25.071 | 1.00 | 7.92 | | O |
| ATOM | 6095 | O6 | AMV B | 1001 | 65.163 | 40.854 | −25.852 | 1.00 | 24.12 | | O |
| ATOM | 6096 | O3 | AMV B | 1001 | 60.734 | 41.058 | −28.117 | 1.00 | 4.63 | | O |
| ATOM | 6097 | O4 | AMV B | 1001 | 63.047 | 38.687 | −28.804 | 1.00 | 11.34 | | O |
| ATOM | 6098 | O2 | AMV B | 1001 | 64.344 | 41.814 | −28.476 | 1.00 | 34.78 | | O |
| ATOM | 6099 | O | HOH D | 1 | 64.005 | 31.246 | −11.042 | 1.00 | 20.00 | | O |
| ATOM | 6100 | O | HOH D | 2 | 61.848 | 19.608 | −7.480 | 1.00 | 20.00 | | O |
| ATOM | 6101 | O | HOH D | 3 | 51.066 | 20.323 | −39.703 | 1.00 | 20.00 | | O |
| ATOM | 6102 | O | HOH D | 4 | 76.392 | 25.736 | −21.665 | 1.00 | 20.00 | | O |
| ATOM | 6103 | O | HOH D | 5 | 46.568 | 22.041 | −36.992 | 1.00 | 20.00 | | O |
| ATOM | 6104 | O | HOH D | 6 | 48.121 | 20.249 | −45.121 | 1.00 | 20.00 | | O |
| ATOM | 6105 | O | HOH D | 7 | 34.232 | 16.102 | −18.843 | 1.00 | 20.00 | | O |
| ATOM | 6106 | O | HOH D | 8 | 51.489 | 57.460 | −45.078 | 1.00 | 20.00 | | O |
| ATOM | 6107 | O | HOH D | 9 | 58.579 | 20.778 | −34.702 | 1.00 | 20.00 | | O |
| ATOM | 6108 | O | HOH D | 10 | 68.981 | 42.818 | −30.924 | 1.00 | 20.00 | | O |
| ATOM | 6109 | O | HOH D | 11 | 64.810 | 30.043 | −23.999 | 1.00 | 20.00 | | O |
| ATOM | 6110 | O | HOH D | 12 | 53.422 | 41.050 | −39.507 | 1.00 | 20.00 | | O |
| ATOM | 6111 | O | HOH D | 13 | 46.960 | 24.197 | −9.261 | 1.00 | 20.00 | | O |
| ATOM | 6112 | O | HOH D | 14 | 68.532 | 35.540 | −55.172 | 1.00 | 20.00 | | O |
| ATOM | 6113 | O | HOH D | 15 | 63.944 | 47.903 | −57.966 | 1.00 | 20.00 | | O |
| ATOM | 6114 | O | HOH D | 16 | 62.779 | 62.495 | −60.984 | 1.00 | 20.00 | | O |
| ATOM | 6115 | O | HOH D | 17 | 60.747 | 18.227 | −44.121 | 1.00 | 20.00 | | O |
| ATOM | 6116 | O | HOH D | 18 | 95.077 | 8.387 | −9.147 | 1.00 | 20.00 | | O |
| ATOM | 6117 | O | HOH D | 19 | 61.506 | 19.570 | −37.091 | 1.00 | 20.00 | | O |
| ATOM | 6118 | O | HOH D | 20 | 46.809 | 34.554 | −59.432 | 1.00 | 20.00 | | O |
| ATOM | 6119 | O | HOH D | 21 | 56.334 | 49.520 | −50.105 | 1.00 | 20.00 | | O |
| ATOM | 6120 | O | HOH D | 22 | 51.485 | 23.526 | −11.441 | 1.00 | 20.00 | | O |
| ATOM | 6121 | O | HOH D | 23 | 51.702 | 38.943 | −45.251 | 1.00 | 20.00 | | O |
| ATOM | 6122 | O | HOH D | 24 | 59.228 | 61.588 | −65.704 | 1.00 | 20.00 | | O |
| ATOM | 6123 | O | HOH D | 25 | 57.712 | 20.837 | −26.885 | 1.00 | 20.00 | | O |
| ATOM | 6124 | O | HOH D | 26 | 54.582 | 3.922 | 1.495 | 1.00 | 20.00 | | O |
| ATOM | 6125 | O | HOH D | 27 | 81.793 | 47.309 | −17.007 | 1.00 | 20.00 | | O |
| ATOM | 6126 | O | HOH D | 28 | 71.251 | 29.816 | −43.556 | 1.00 | 20.00 | | O |
| ATOM | 6127 | O | HOH D | 29 | 71.679 | 46.460 | −10.067 | 1.00 | 20.00 | | O |
| ATOM | 6128 | O | HOH D | 30 | 76.961 | 47.578 | −44.179 | 1.00 | 20.00 | | O |
| ATOM | 6129 | O | HOH D | 31 | 64.772 | 45.315 | −22.799 | 1.00 | 20.00 | | O |
| ATOM | 6130 | O | HOH D | 32 | 77.609 | 42.323 | −1.630 | 1.00 | 20.00 | | O |
| ATOM | 6131 | O | HOH D | 33 | 104.548 | 8.329 | −15.304 | 1.00 | 20.00 | | O |
| ATOM | 6132 | O | HOH D | 34 | 67.658 | 65.929 | −55.857 | 1.00 | 20.00 | | O |
| ATOM | 6133 | O | HOH D | 35 | 65.394 | 36.084 | −18.556 | 1.00 | 20.00 | | O |
| ATOM | 6134 | O | HOH D | 36 | 84.303 | 16.454 | −16.357 | 1.00 | 20.00 | | O |
| ATOM | 6135 | O | HOH D | 37 | 76.097 | 46.951 | −21.236 | 1.00 | 20.00 | | O |
| ATOM | 6136 | O | HOH D | 38 | 48.202 | 13.138 | −12.488 | 1.00 | 20.00 | | O |
| ATOM | 6137 | O | HOH D | 39 | 59.799 | 16.594 | −34.215 | 1.00 | 20.00 | | O |
| ATOM | 6138 | O | HOH D | 40 | 59.370 | 20.849 | −52.882 | 1.00 | 20.00 | | O |
| ATOM | 6139 | O | HOH D | 41 | 77.997 | 30.456 | −10.585 | 1.00 | 20.00 | | O |
| ATOM | 6140 | O | HOH D | 42 | 57.700 | 38.863 | −59.284 | 1.00 | 20.00 | | O |
| ATOM | 6141 | O | HOH D | 43 | 67.268 | 44.382 | −12.739 | 1.00 | 20.00 | | O |
| ATOM | 6142 | O | HOH D | 44 | 51.926 | 51.503 | −24.166 | 1.00 | 20.00 | | O |
| ATOM | 6143 | O | HOH D | 45 | 49.257 | 35.288 | −40.043 | 1.00 | 20.00 | | O |
| ATOM | 6144 | O | HOH D | 46 | 62.693 | 54.814 | −61.844 | 1.00 | 20.00 | | O |
| ATOM | 6145 | O | HOH D | 47 | 52.220 | 11.904 | −10.701 | 1.00 | 20.00 | | O |
| ATOM | 6146 | O | HOH D | 48 | 54.083 | 45.841 | −24.932 | 1.00 | 20.00 | | O |
| ATOM | 6147 | O | HOH D | 49 | 57.444 | 29.332 | −60.105 | 1.00 | 20.00 | | O |
| ATOM | 6148 | O | HOH D | 50 | 56.133 | 36.885 | −13.283 | 1.00 | 20.00 | | O |
| ATOM | 6149 | O | HOH D | 51 | 66.258 | 38.392 | −17.330 | 1.00 | 20.00 | | O |
| ATOM | 6150 | O | HOH D | 52 | 52.174 | 54.130 | −66.229 | 1.00 | 20.00 | | O |
| ATOM | 6151 | O | HOH D | 53 | 61.083 | 47.734 | −10.678 | 1.00 | 20.00 | | O |
| ATOM | 6152 | O | HOH D | 54 | 64.531 | 13.236 | 6.232 | 1.00 | 20.00 | | O |
| ATOM | 6153 | O | HOH D | 55 | 60.293 | 52.743 | −55.571 | 1.00 | 20.00 | | O |
| ATOM | 6154 | O | HOH D | 56 | 52.108 | 43.526 | −46.142 | 1.00 | 20.00 | | O |
| ATOM | 6155 | O | HOH D | 57 | 60.063 | 19.385 | −3.511 | 1.00 | 20.00 | | O |
| ATOM | 6156 | O | HOH D | 58 | 75.563 | 45.451 | −40.060 | 1.00 | 20.00 | | O |
| ATOM | 6157 | O | HOH D | 59 | 71.979 | 39.579 | 3.981 | 1.00 | 20.00 | | O |
| ATOM | 6158 | O | HOH D | 60 | 45.682 | 29.099 | −47.872 | 1.00 | 20.00 | | O |
| ATOM | 6159 | O | HOH D | 61 | 71.067 | 30.868 | −5.015 | 1.00 | 20.00 | | O |
| ATOM | 6160 | O | HOH D | 62 | 60.659 | 18.305 | −24.281 | 1.00 | 20.00 | | O |
| ATOM | 6161 | O | HOH D | 63 | 44.359 | 21.281 | −42.863 | 1.00 | 20.00 | | O |
| ATOM | 6162 | O | HOH D | 64 | 57.959 | 55.697 | −57.920 | 1.00 | 20.00 | | O |
| ATOM | 6163 | O | HOH D | 65 | 58.446 | 52.296 | −29.595 | 1.00 | 20.00 | | O |
| ATOM | 6164 | O | HOH D | 66 | 67.212 | 38.841 | −4.900 | 1.00 | 20.00 | | O |
| ATOM | 6165 | O | HOH D | 67 | 71.061 | 42.887 | 4.621 | 1.00 | 20.00 | | O |
| ATOM | 6166 | O | HOH D | 68 | 72.173 | 47.222 | −18.486 | 1.00 | 20.00 | | O |
| ATOM | 6167 | O | HOH D | 69 | 61.180 | 29.465 | 6.359 | 1.00 | 20.00 | | O |
| ATOM | 6168 | O | HOH D | 70 | 53.686 | 19.114 | −17.263 | 1.00 | 20.00 | | O |
| ATOM | 6169 | O | HOH D | 71 | 94.324 | 10.514 | −22.199 | 1.00 | 20.00 | | O |
| ATOM | 6170 | O | HOH D | 72 | 71.727 | 30.019 | 1.431 | 1.00 | 20.00 | | O |
| ATOM | 6171 | O | HOH D | 73 | 68.203 | 22.419 | −44.523 | 1.00 | 20.00 | | O |
| ATOM | 6172 | O | HOH D | 74 | 86.700 | 43.770 | −10.866 | 1.00 | 20.00 | | O |
| ATOM | 6173 | O | HOH D | 75 | 49.053 | 1.930 | −4.743 | 1.00 | 20.00 | | O |
| ATOM | 6174 | O | HOH D | 76 | 48.953 | 41.469 | −35.852 | 1.00 | 20.00 | | O |
| ATOM | 6175 | O | HOH D | 77 | 82.324 | 43.914 | −3.552 | 1.00 | 20.00 | | O |
| ATOM | 6176 | O | HOH D | 78 | 61.390 | 31.895 | −61.735 | 1.00 | 20.00 | | O |
| ATOM | 6177 | O | HOH D | 79 | 54.422 | 21.537 | −25.218 | 1.00 | 20.00 | | O |
| ATOM | 6178 | O | HOH D | 80 | 60.649 | 30.670 | −2.107 | 1.00 | 20.00 | | O |
| ATOM | 6179 | O | HOH D | 81 | 57.672 | 45.977 | −12.143 | 1.00 | 20.00 | | O |
| ATOM | 6180 | O | HOH D | 82 | 65.179 | 40.572 | −36.435 | 1.00 | 20.00 | | O |
| ATOM | 6181 | O | HOH D | 83 | 59.030 | 29.360 | −26.403 | 1.00 | 20.00 | | O |
| ATOM | 6182 | O | HOH D | 84 | 56.594 | 22.155 | 10.811 | 1.00 | 20.00 | | O |
| ATOM | 6183 | O | HOH D | 85 | 65.436 | 43.103 | −27.013 | 1.00 | 20.00 | | O |
| ATOM | 6184 | O | HOH D | 86 | 89.907 | 6.442 | −2.810 | 1.00 | 20.00 | | O |
| ATOM | 6185 | O | HOH D | 87 | 70.388 | 24.868 | −42.470 | 1.00 | 20.00 | | O |
| ATOM | 6186 | O | HOH D | 88 | 58.020 | 10.532 | −3.262 | 1.00 | 20.00 | | O |
| ATOM | 6187 | O | HOH D | 89 | 77.585 | 19.803 | −24.675 | 1.00 | 20.00 | | O |
| ATOM | 6188 | O | HOH D | 90 | 68.516 | 44.759 | −75.007 | 1.00 | 20.00 | | O |
| ATOM | 6189 | O | HOH D | 91 | 65.211 | 29.187 | −55.944 | 1.00 | 20.00 | | O |
| ATOM | 6190 | O | HOH D | 92 | 75.807 | 68.071 | −44.741 | 1.00 | 20.00 | | O |
| ATOM | 6191 | O | HOH D | 93 | 57.689 | 41.210 | −30.041 | 1.00 | 20.00 | | O |
| ATOM | 6192 | O | HOH D | 94 | 43.896 | 2.084 | −10.290 | 1.00 | 20.00 | | O |
| ATOM | 6193 | O | HOH D | 95 | 84.660 | 25.547 | −5.453 | 1.00 | 20.00 | | O |
| ATOM | 6194 | O | HOH D | 96 | 60.499 | 75.473 | −31.924 | 1.00 | 20.00 | | O |
| ATOM | 6195 | O | HOH D | 97 | 60.009 | 48.578 | −76.553 | 1.00 | 20.00 | | O |
| ATOM | 6196 | O | HOH D | 98 | 76.515 | 36.746 | −40.808 | 1.00 | 20.00 | | O |
| ATOM | 6197 | O | HOH D | 99 | 64.802 | 12.673 | −21.721 | 1.00 | 20.00 | | O |
| ATOM | 6198 | O | HOH D | 100 | 82.399 | 26.386 | −39.626 | 1.00 | 20.00 | | O |
| ATOM | 6199 | O | HOH D | 101 | 70.077 | 35.468 | −28.982 | 1.00 | 20.00 | | O |
| ATOM | 6200 | O | HOH D | 102 | 52.710 | 55.450 | −32.808 | 1.00 | 20.00 | | O |
| ATOM | 6201 | O | HOH D | 103 | 59.976 | 2.969 | −12.580 | 1.00 | 20.00 | | O |
| ATOM | 6202 | O | HOH D | 104 | 86.802 | 41.783 | −36.452 | 1.00 | 20.00 | | O |
| ATOM | 6203 | O | HOH D | 105 | 84.149 | 27.273 | −13.597 | 1.00 | 20.00 | | O |
| ATOM | 6204 | O | HOH D | 106 | 71.556 | 29.575 | −2.196 | 1.00 | 20.00 | | O |
| ATOM | 6205 | O | HOH D | 107 | 51.264 | 52.557 | −49.022 | 1.00 | 20.00 | | O |
| ATOM | 6206 | O | HOH D | 108 | 75.268 | 65.764 | −28.610 | 1.00 | 20.00 | | O |
| ATOM | 6207 | O | HOH D | 109 | 82.562 | 14.795 | −24.801 | 1.00 | 20.00 | | O |
| ATOM | 6208 | O | HOH D | 110 | 50.132 | 18.739 | −52.640 | 1.00 | 20.00 | | O |
| ATOM | 6209 | O | HOH D | 111 | 71.354 | 24.987 | −36.642 | 1.00 | 20.00 | | O |
| ATOM | 6210 | O | HOH D | 112 | 45.114 | 32.720 | −52.267 | 1.00 | 20.00 | | O |
| ATOM | 6211 | O | HOH D | 113 | 48.420 | 0.249 | −2.315 | 1.00 | 20.00 | | O |
| ATOM | 6212 | O | HOH D | 114 | 63.390 | 16.967 | −37.223 | 1.00 | 20.00 | | O |
| ATOM | 6213 | O | HOH D | 115 | 44.699 | 36.738 | −43.228 | 1.00 | 20.00 | | O |
| ATOM | 6214 | O | HOH D | 116 | 56.574 | 71.854 | −54.993 | 1.00 | 20.00 | | O |
| ATOM | 6215 | O | HOH D | 117 | 53.797 | 60.299 | −41.403 | 1.00 | 20.00 | | O |
| ATOM | 6216 | O | HOH D | 118 | 46.104 | 2.883 | 0.638 | 1.00 | 20.00 | | O |
| ATOM | 6217 | O | HOH D | 119 | 53.543 | 28.997 | −9.765 | 1.00 | 20.00 | | O |
| ATOM | 6218 | O | HOH D | 120 | 72.241 | 43.861 | −26.923 | 1.00 | 20.00 | | O |
| ATOM | 6219 | O | HOH D | 121 | 63.247 | 65.191 | −20.060 | 1.00 | 20.00 | | O |
| ATOM | 6220 | O | HOH D | 122 | 45.329 | 19.594 | −13.586 | 1.00 | 20.00 | | O |
| ATOM | 6221 | O | HOH D | 123 | 64.023 | 26.710 | −49.259 | 1.00 | 20.00 | | O |
| ATOM | 6222 | O | HOH D | 124 | 48.910 | 41.318 | −22.753 | 1.00 | 20.00 | | O |
| ATOM | 6223 | O | HOH D | 125 | 82.532 | 60.598 | −36.480 | 1.00 | 20.00 | | O |
| ATOM | 6224 | O | HOH D | 126 | 67.063 | 13.897 | −30.167 | 1.00 | 20.00 | | O |
| ATOM | 6225 | O | HOH D | 127 | 50.361 | 40.065 | −56.024 | 1.00 | 20.00 | | O |
| ATOM | 6226 | O | HOH D | 128 | 72.976 | 45.157 | −4.246 | 1.00 | 20.00 | | O |
| ATOM | 6227 | O | HOH D | 129 | 75.216 | 64.672 | −53.791 | 1.00 | 20.00 | | O |
| ATOM | 6228 | O | HOH D | 130 | 65.468 | 10.968 | −15.412 | 1.00 | 20.00 | | O |
| ATOM | 6229 | O | HOH D | 131 | 51.343 | 68.145 | −32.846 | 1.00 | 20.00 | | O |
| ATOM | 6230 | O | HOH D | 132 | 56.280 | 52.648 | −67.213 | 1.00 | 20.00 | | O |
| ATOM | 6231 | O | HOH D | 133 | 56.735 | 56.430 | −23.538 | 1.00 | 20.00 | | O |
| ATOM | 6232 | O | HOH D | 134 | 60.995 | 39.033 | −31.591 | 1.00 | 20.00 | | O |
| ATOM | 6233 | O | HOH D | 135 | 89.055 | 32.196 | −5.724 | 1.00 | 20.00 | | O |
| ATOM | 6234 | O | HOH D | 136 | 72.037 | 50.093 | −76.504 | 1.00 | 20.00 | | O |
| ATOM | 6235 | O | HOH D | 137 | 58.047 | 16.908 | −24.405 | 1.00 | 20.00 | | O |
| ATOM | 6236 | O | HOH D | 138 | 77.131 | 28.831 | −4.157 | 1.00 | 20.00 | | O |
| ATOM | 6237 | O | HOH D | 139 | 77.050 | −0.539 | −22.670 | 1.00 | 20.00 | | O |
| ATOM | 6238 | O | HOH D | 140 | 49.237 | 43.219 | −19.100 | 1.00 | 20.00 | | O |
| ATOM | 6239 | O | HOH D | 141 | 51.363 | 54.581 | −35.081 | 1.00 | 20.00 | | O |
| ATOM | 6240 | O | HOH D | 142 | 60.768 | 12.246 | 3.533 | 1.00 | 20.00 | | O |
| ATOM | 6241 | O | HOH D | 143 | 82.143 | 33.605 | −11.456 | 1.00 | 20.00 | | O |
| ATOM | 6242 | O | HOH D | 144 | 84.866 | 34.019 | −4.279 | 1.00 | 20.00 | | O |
| ATOM | 6243 | O | HOH D | 145 | 46.907 | 21.739 | −20.630 | 1.00 | 20.00 | | O |
| ATOM | 6244 | O | HOH D | 146 | 63.588 | 51.236 | −61.514 | 1.00 | 20.00 | | O |
| ATOM | 6245 | O | HOH D | 147 | 76.048 | 26.901 | −8.051 | 1.00 | 20.00 | | O |
| ATOM | 6246 | O | HOH D | 148 | 75.152 | 17.176 | −9.502 | 1.00 | 20.00 | | O |
| ATOM | 6247 | O | HOH D | 149 | 53.908 | 49.543 | −48.224 | 1.00 | 20.00 | | O |
| ATOM | 6248 | O | HOH D | 150 | 55.904 | 34.679 | −28.831 | 1.00 | 20.00 | | O |
| ATOM | 6249 | O | HOH D | 151 | 82.610 | 13.849 | −0.078 | 1.00 | 20.00 | | O |
| ATOM | 6250 | O | HOH D | 152 | 66.977 | 30.695 | −54.273 | 1.00 | 20.00 | | O |
| ATOM | 6251 | O | HOH D | 153 | 66.841 | 35.486 | −1.504 | 1.00 | 20.00 | | O |
| ATOM | 6252 | O | HOH D | 154 | 82.757 | 34.137 | 3.334 | 1.00 | 20.00 | | O |
| ATOM | 6253 | O | HOH D | 155 | 54.147 | 9.570 | 3.284 | 1.00 | 20.00 | | O |
| ATOM | 6254 | O | HOH D | 156 | 80.578 | 41.318 | −34.825 | 1.00 | 20.00 | | O |
| ATOM | 6255 | O | HOH D | 157 | 63.302 | 21.304 | −5.676 | 1.00 | 20.00 | | O |
| ATOM | 6256 | O | HOH D | 158 | 64.938 | 71.646 | −51.103 | 1.00 | 20.00 | | O |
| ATOM | 6257 | O | HOH D | 159 | 95.142 | 46.020 | −17.820 | 1.00 | 20.00 | | O |
| ATOM | 6258 | O | HOH D | 160 | 75.645 | 45.515 | −4.504 | 1.00 | 20.00 | | O |
| ATOM | 6259 | O | HOH D | 161 | 49.971 | 51.159 | −51.013 | 1.00 | 20.00 | | O |
| ATOM | 6260 | O | HOH D | 162 | 46.062 | 62.230 | −35.071 | 1.00 | 20.00 | | O |
| ATOM | 6261 | O | HOH D | 163 | 64.042 | 23.147 | 3.695 | 1.00 | 20.00 | | O |
| ATOM | 6262 | O | HOH D | 164 | 54.456 | 56.856 | −17.260 | 1.00 | 20.00 | | O |
| ATOM | 6263 | O | HOH D | 165 | 80.892 | 59.070 | −39.373 | 1.00 | 20.00 | | O |
| ATOM | 6264 | O | HOH D | 166 | 78.713 | 27.343 | −17.177 | 1.00 | 20.00 | | O |
| ATOM | 6265 | O | HOH D | 167 | 56.338 | 42.558 | −38.635 | 1.00 | 20.00 | | O |
| ATOM | 6266 | O | HOH D | 168 | 81.550 | 66.121 | −39.390 | 1.00 | 20.00 | | O |
| ATOM | 6267 | O | HOH D | 169 | 76.949 | −1.075 | −9.319 | 1.00 | 20.00 | | O |
| ATOM | 6268 | O | HOH D | 170 | 54.280 | 63.938 | −61.226 | 1.00 | 20.00 | | O |
| ATOM | 6269 | O | HOH D | 171 | 48.871 | 55.989 | −32.767 | 1.00 | 20.00 | | O |
| ATOM | 6270 | O | HOH D | 172 | 44.127 | 41.159 | −37.268 | 1.00 | 20.00 | | O |
| ATOM | 6271 | O | HOH D | 173 | 73.358 | 23.594 | −6.296 | 1.00 | 20.00 | | O |
| ATOM | 6272 | O | HOH D | 174 | 83.332 | 40.334 | 3.740 | 1.00 | 20.00 | | O |
| ATOM | 6273 | O | HOH D | 175 | 57.456 | 61.840 | −28.946 | 1.00 | 20.00 | | O |
| ATOM | 6274 | O | HOH D | 176 | 47.864 | 39.468 | −52.196 | 1.00 | 20.00 | | O |
| ATOM | 6275 | O | HOH D | 177 | 70.906 | 44.639 | −40.681 | 1.00 | 20.00 | | O |
| ATOM | 6276 | O | HOH D | 178 | 47.058 | 37.463 | −50.633 | 1.00 | 20.00 | | O |
| ATOM | 6277 | O | HOH D | 179 | 86.981 | 6.334 | −19.280 | 1.00 | 20.00 | | O |
| ATOM | 6278 | O | HOH D | 180 | 44.628 | 56.126 | −34.042 | 1.00 | 20.00 | | O |
| ATOM | 6279 | O | HOH D | 181 | 83.980 | 53.458 | −40.071 | 1.00 | 20.00 | | O |
| ATOM | 6280 | O | HOH D | 182 | 59.166 | 73.532 | −46.016 | 1.00 | 20.00 | | O |
| ATOM | 6281 | O | HOH D | 183 | 77.303 | 44.139 | 0.829 | 1.00 | 20.00 | | O |
| ATOM | 6282 | O | HOH D | 184 | 80.642 | 24.436 | −31.825 | 1.00 | 20.00 | | O |
| ATOM | 6283 | O | HOH D | 185 | 43.385 | 53.300 | −33.516 | 1.00 | 20.00 | | O |
| ATOM | 6284 | O | HOH D | 186 | 62.566 | 23.618 | 1.479 | 1.00 | 20.00 | | O |
| ATOM | 6285 | O | HOH D | 187 | 73.669 | 57.702 | −22.905 | 1.00 | 20.00 | | O |
| ATOM | 6286 | O | HOH D | 188 | 49.415 | 59.473 | −24.944 | 1.00 | 20.00 | | O |
| ATOM | 6287 | O | HOH D | 189 | 71.810 | 61.853 | −59.613 | 1.00 | 20.00 | | O |
| ATOM | 6288 | O | HOH D | 190 | 62.070 | 57.486 | −19.683 | 1.00 | 20.00 | | O |
| ATOM | 6289 | O | HOH D | 191 | 56.953 | 67.436 | −60.936 | 1.00 | 20.00 | | O |
| ATOM | 6290 | O | HOH D | 192 | 82.033 | 55.372 | −41.403 | 1.00 | 20.00 | | O |
| ATOM | 6291 | O | HOH D | 193 | 47.622 | 44.222 | −37.928 | 1.00 | 20.00 | | O |
| ATOM | 6292 | O | HOH D | 194 | 45.429 | 32.478 | −56.159 | 1.00 | 20.00 | | O |
| ATOM | 6293 | O | HOH D | 195 | 44.089 | 24.893 | −38.558 | 1.00 | 20.00 | | O |
| ATOM | 6294 | O | HOH D | 196 | 87.459 | 2.740 | −23.712 | 1.00 | 20.00 | | O |
| ATOM | 6295 | O | HOH D | 197 | 43.461 | 21.812 | −12.797 | 1.00 | 20.00 | | O |
| ATOM | 6296 | O | HOH D | 198 | 53.724 | 41.172 | −56.872 | 1.00 | 20.00 | | O |
| ATOM | 6297 | O | HOH D | 199 | 90.493 | 44.361 | −31.343 | 1.00 | 20.00 | | O |
| ATOM | 6298 | O | HOH D | 200 | 62.530 | 47.992 | −18.654 | 1.00 | 20.00 | | O |
| ATOM | 6299 | O | HOH D | 201 | 105.952 | 13.181 | −18.288 | 1.00 | 20.00 | | O |
| ATOM | 6300 | O | HOH D | 202 | 64.012 | 47.558 | −47.893 | 1.00 | 20.00 | | O |
| ATOM | 6301 | O | HOH D | 203 | 71.648 | 19.923 | −53.444 | 1.00 | 20.00 | | O |
| ATOM | 6302 | O | HOH D | 204 | 57.867 | 9.549 | 8.360 | 1.00 | 20.00 | | O |
| ATOM | 6303 | O | HOH D | 205 | 67.895 | 29.061 | 11.145 | 1.00 | 20.00 | | O |
| ATOM | 6304 | O | HOH D | 206 | 46.864 | 2.022 | −10.737 | 1.00 | 20.00 | | O |
| ATOM | 6305 | O | HOH D | 207 | 72.344 | 41.871 | −60.207 | 1.00 | 20.00 | | O |
| ATOM | 6306 | O | HOH D | 208 | 76.428 | 69.471 | −39.044 | 1.00 | 20.00 | | O |
| ATOM | 6307 | O | HOH D | 209 | 66.747 | 25.420 | −54.664 | 1.00 | 20.00 | | O |
| ATOM | 6308 | O | HOH D | 210 | 93.795 | 50.023 | −36.541 | 1.00 | 20.00 | | O |
| ATOM | 6309 | O | HOH D | 211 | 78.065 | 66.179 | −41.924 | 1.00 | 20.00 | | O |
| ATOM | 6310 | O | HOH D | 212 | 76.175 | 17.753 | −23.518 | 1.00 | 20.00 | | O |
| ATOM | 6311 | O | HOH D | 213 | 86.703 | 56.266 | −23.536 | 1.00 | 20.00 | | O |
| ATOM | 6312 | O | HOH D | 214 | 65.986 | 14.564 | 3.742 | 1.00 | 20.00 | | O |
| ATOM | 6313 | O | HOH D | 215 | 98.725 | 3.513 | −17.143 | 1.00 | 20.00 | | O |
| ATOM | 6314 | O | HOH D | 216 | 79.130 | 26.874 | −19.954 | 1.00 | 20.00 | | O |
| ATOM | 6315 | O | HOH D | 217 | 49.317 | 53.293 | −46.497 | 1.00 | 20.00 | | O |
| ATOM | 6316 | O | HOH D | 218 | 90.903 | 5.188 | −21.891 | 1.00 | 20.00 | | O |
| ATOM | 6317 | O | HOH D | 219 | 62.347 | 40.747 | −30.721 | 1.00 | 20.00 | | O |
| ATOM | 6318 | O | HOH D | 220 | 40.643 | 60.376 | −62.136 | 1.00 | 20.00 | | O |
| ATOM | 6319 | O | HOH D | 221 | 71.503 | 54.166 | −54.497 | 1.00 | 20.00 | | O |
| ATOM | 6320 | O | HOH D | 222 | 44.805 | 23.084 | −40.706 | 1.00 | 20.00 | | O |
| ATOM | 6321 | O | HOH D | 223 | 51.651 | 36.116 | −28.720 | 1.00 | 20.00 | | O |
| ATOM | 6322 | O | HOH D | 224 | 59.269 | 20.776 | 3.522 | 1.00 | 20.00 | | O |
| ATOM | 6323 | O | HOH D | 225 | 77.291 | 19.357 | −18.420 | 1.00 | 20.00 | | O |
| ATOM | 6324 | O | HOH D | 226 | 44.413 | 54.785 | −38.531 | 1.00 | 20.00 | | O |
| ATOM | 6325 | O | HOH D | 227 | 90.231 | 4.458 | −4.698 | 1.00 | 20.00 | | O |
| ATOM | 6326 | O | HOH D | 228 | 43.333 | 12.575 | 3.377 | 1.00 | 20.00 | | O |
| ATOM | 6327 | O | HOH D | 229 | 44.195 | 19.482 | 0.211 | 1.00 | 20.00 | | O |
| ATOM | 6328 | O | HOH D | 230 | 69.638 | 22.262 | −38.599 | 1.00 | 20.00 | | O |
| ATOM | 6329 | O | HOH D | 231 | 47.271 | 22.934 | −17.869 | 1.00 | 20.00 | | O |
| ATOM | 6330 | O | HOH D | 232 | 45.447 | 36.954 | −39.399 | 1.00 | 20.00 | | O |
| ATOM | 6331 | O | HOH D | 233 | 77.160 | 62.378 | −49.290 | 1.00 | 20.00 | | O |
| ATOM | 6332 | O | HOH D | 234 | 71.208 | 33.921 | 2.980 | 1.00 | 20.00 | | O |
| ATOM | 6333 | O | HOH D | 235 | 52.702 | 27.857 | −26.436 | 1.00 | 20.00 | | O |
| ATOM | 6334 | O | HOH D | 236 | 56.489 | 22.551 | 14.990 | 1.00 | 20.00 | | O |
| ATOM | 6335 | O | HOH D | 237 | 88.130 | 58.148 | −22.506 | 1.00 | 20.00 | | O |
| ATOM | 6336 | O | HOH D | 238 | 56.698 | 27.605 | −26.317 | 1.00 | 20.00 | | O |
| ATOM | 6337 | O | HOH D | 239 | 56.912 | 45.842 | −9.201 | 1.00 | 20.00 | | O |
| ATOM | 6338 | O | HOH D | 240 | 65.448 | 9.613 | −21.628 | 1.00 | 20.00 | | O |
| ATOM | 6339 | O | HOH D | 241 | 46.950 | 18.587 | 1.252 | 1.00 | 20.00 | | O |
| ATOM | 6340 | O | HOH D | 242 | 69.391 | 27.146 | −54.199 | 1.00 | 20.00 | | O |
| ATOM | 6341 | O | HOH D | 243 | 50.184 | 17.922 | 0.936 | 1.00 | 20.00 | | O |
| ATOM | 6342 | O | HOH D | 244 | 70.148 | 41.168 | −42.647 | 1.00 | 20.00 | | O |
| END | | | | | | | | | | | |

### FURTHER REFERENCES

[0205] Rey M, Valenzuela-Fernandez A, Urzainqui A, Yanez-Mo M, Perez-Martinez M, Penela P, Mayor F, Jr., Sanchez-Madrid F. Myosin IIA is involved in the endocytosis of CXCR4 induced by SDF-1alpha. J Cell Sci 120:1126-1133 (2007)
[0206] Minamiya, Y., Nakagawa, T., Saito, H.: Ioncreased expression of myosin light chain kinase mRNA is related to metastasis in non-small cell lung cancer. Tumour Biol 26: 153-157 (2005)
[0207] Lehmann, M. J., Sherer, N. M., Marks, C. B., Pypaert, M., Mothes, W.: Actin- and myosin-driven movement of viruses along filopodia precedes their entry into cells. J Cell Biol 170: 317-325 (2005)
[0208] Sun, X., Whittaker, G. R.: Role of the actin cytoskeleton during influenza virus internalization into polarized epithelial cells. Cell Microbiol 9:1672-1682 (2007)
[0209] Kawakami, S.; Watanabe, Y.; Beachy, R. N. Tobacco mosaic virus infection spreads cell to cell as intact replication complexes PNAS 101: 6291-6296 (2004)
[0210] Soldati, O., Foth, B. J., Cowman, A F.: Molecular and functional aspects of parasite invasion. Trends in Parasitology 20: 567-574 (2004)
[0211] Desnos C, Huet S, Darchen F. ‘“Should I stay or go?”:myosin V function in organelle trafficking. Biol Cell 99:411-23 (2007)
[0212] Sasaki H, Nakamura M, Ohno T, Matsuda Y, Yuda Y, Nonomura Y: Myosin-actin interaction plays an important role in human immunodeficiency virus type 1 release from host cells. Proc Natl Acad Sci USA. 92:2026-30 (1995)
[0213] Desnos C, Huet S, Darchen F.: Should I stay or should I go?’: myosin V function in organelle trafficking. Biol Cell. 2007 August; 99(8):411-23.
[0214] Kim M T, Kim B J, Lee J H, Kwon S C, Yeon D S, Yang D K, So I, Kim K W. Involvement of calmodulin and myosin light chain kinase in activation of mTRPCS expressed in HEK cells. Am J Physiol Cell Physiol. 2006 April; 290(4):C1031-40. Epub 2005 Nov. 23.
[0215] Andzelm, M. M., X. Chen, et al. (2007). “Myosin IIA is required for cytolytic granule exocytosis in human NK cells.” J Exp Med 204(10): 2285-91.
[0216] Bement, W. M., T. Hasson, et al. (1994). “Identification and overlapping expression of multiple unconventional myosin genes in vertebrate cell types.” Proc Natl Acad Sci USA 91(14): 6549-53.
[0217] Bement, W. M., J. A. Wirth, et al. (1994). “Cloning and mRNA expression of human unconventional myosin-IC. A homologue of amoeboid myosins-1 with a single IQ motif and an SH3 domain.” J Mol Biol 243(2): 356-63.
[0218] Berg, J. S., B. C. Powell, et al. (2001). “A millennial myosin census.” Mol Biol Cell 12(4): 780-94.
[0219] Bohil, A. B., B. W. Robertson, et al. (2006). “Myosin-X is a molecular motor that functions in filopodia formation.” Proc Natl Acad Sci USA 103(33): 12411-6.
[0220] Crozet, F., A. el Amraoui, et al. (1997). “Cloning of the genes encoding two murine and human cochlear unconventional type I myosins.” Genomics 40(2): 332-41.
[0221] Delbac, F., A. Sanger, et al. (2001). “Toxoplasma gondii myosins B/C: one gene, two tails, two localizations, and a role in parasite division.” J Cell Biol 155(4): 613-23.
[0222] Desjardins, P. R., J. M. Burkman, et al. (2002). “Evolutionary implications of three novel members of the human sarcomeric myosin heavy chain gene family.” Mol Biol Evol 19(4): 375-93.
[0223] Desnos, C., S. Huet, et al. (2007). “Myosin va mediates docking of secretory granules at the plasma membrane.” J Neurosci 27(39): 10636-45.
[0224] Donaudy, F., R. Snoeckx, et al. (2004). “Nonmuscle myosin heavy-chain gene MYH14 is expressed in cochlea and mutated in patients affected by autosomal dominant hearing impairment (DFNA4).” Am J Hum Genet 74(4): 770-6.
[0225] Dose, A. C. and B. Burnside (2000). “Cloning and chromosomal localization of a human class III myosin.” Genomics 67(3): 333-42.
[0226] Dose, A. C. and B. Burnside (2002). “A class III myosin expressed in the retina is a potential candidate for Bardet-Biedl syndrome.” Genomics 79(5): 621-4.
[0227] Dunham, I., N. Shimizu, et al. (1999). “The DNA sequence of human chromosome 22.” Nature 402(6761): 489-95.
[0228] Dunn, T. A., S. Chen, et al. (2006). “A novel role of myosin VI in human prostate cancer.” Am J Pathol 169(5): 1843-54.
[0229] Edakuni, N., K. Ikuta, at al. (2006). “Restored expression of the MYO18B gene suppresses orthotopic growth and the production of bloody pleural effusion by human malignant pleural mesothelioma cells in SCID mice.” Oncol Res 16(5): 235-43.
[0230] Eller, M., H. H. Stedman, et al. (1989). “Nucleotide sequence of full length human embryonic myosin heavy chain cDNA.” Nucleic Acids Res 17(9): 3591
[0231] Engle, L. J. and R. H. Kennett (1994). “Cloning, analysis, and chromosomal localization of myoxin (MYH12), the human homologue to the mouse dilute gene.” Genomics 19(3): 407-16.
[0232] Foth, B. J., M. C. Goedecke, et al. (2006). “New insights into myosin evolution and classification.” Proc Natl Acad Sci USA 103(10): 3681-6.
[0233] Furusawa, T., S. Ikawa, et al. (2000). “Isolation of a novel PDZ-containing myosin from hematopoietic supportive bone marrow stromal cell lines.” Biochem Biophys Res Commun 270(1): 67-75.
[0234] Hasson, T., J. F. Skowron, et al. (1996). “Mapping of unconventional myosins in mouse and human.” Genomics 36(3): 431-9.
[0235] Heintzelman, M. B. and J. D. Schwartzman (1997). “A novel class of unconventional myosins from Toxoplasma gondii.” J Mol Biol 271(1): 139-46.
[0236] Hofmann, W. A., T. Johnson, et al. (2006). “From transcription to transport: emerging roles for nuclear myosin I.” Biochem Cell Biol 84(4): 418-26.
[0237] Jaijo, T., E.-Aller, et al. (2007). “MYO7A mutation screening in Usher syndrome type I patients from diverse origins.” J Med Genet 44(3): e71.
[0238] Krendel, M., E. K. Osterweil, et al. (2007). “Myosin 1E interacts with synaptojanin-1 and dynamin and is involved in endocytosis.” FEBS Lett 581(4): 644-50.
[0239] Lapierre, L. A., R. Kumar, et al. (2001). “Myosin vb is associated with plasma membrane recycling systems.” Mol Biol Cell 12(6): 1843-57.
[0240] Lee, Y. R. and B. Liu (2004). “Cytoskeletal motors in Arabidopsis. Sixty-one kinesins and seventeen myosins.” Plant Physiol 136(4): 3877-83.
[0241] Leinwand, L. A., L. Saez, et al. (1983). “Isolation and characterization of human myosin heavy chain genes.” Proc Natl Acad Sci USA 80(12): 3716-20.
[0242] Liang, Y., A. Wang, et al. (1999). “Characterization of the human and mouse unconventional myosin XV genes responsible for hereditary deafness DFNB3 and shaker 2.” Genomics 61(3): 243-58.
[0243] Matsuoka, R., M. C. Yoshida, et al. (1993). “Human smooth muscle myosin heavy chain gene mapped to chromosomal region 16q12.” Am J Med Genet 46(1): 61-7.
[0244] Mori, K., T. Furusawa, et al. (2003). “Genome structure and differential expression of two isoforms of a novel PDZ-containing myosin (MysPDZ) (Myo18A),” J Biochem (Tokyo) 133(4): 405-13.
[0245] Pegoraro, E., B. F. Gavassini, et al. (2007). “MYH7 gene mutation in myosin storage myopathy and scapulo-peroneal myopathy.” Neuromuscul Disord 17(4): 321-9.
[0246] Rodriguez, O. C. and R. E. Cheney (2002). “Human myosin-Vc is a novel class V myosin expressed in epithelial cells.” J Cell Sci 115(Pt 5): 991-1004.
[0247] Ruppert, C., R. Kroschewski, at al. (1993). “Identification, characterization and cloning of myr 1, a mammalian myosin-I.” J Cell Biol 120(6): 1393-403.
[0248] Salas-Cortes, L., F. Ye, et al. (2005). “Myosin Ib modulates the morphology and the protein transport within multi-vesicular sorting endosomes.” J Cell Sci 118(Pt 20): 4823-32.
[0249] Sanchez, E., B. Z. Alizadeh, et al. (2007). “MYO9B gene polymorphisms are associated with autoimmune diseases in Spanish population.” Hum Immunol 68(7):610-5.
[0250] Schachat, F. and M. M. Briggs (2002). “Phylogenetic implications of the superfast myosin in extraocular muscles.” J Exp Biol 205(Pt 15): 2189-201.
[0251] Scherer, S. W., J. Cheung, et al. (2003). “Human chromosome 7: DNA sequence and biology.” Science 300(5620): 767-72.
[0252] Shimmen, T. (2007). “The sliding theory of cytoplasmic streaming: fifty years of progress.” J Plant Res 120(1): 31-43.
[0253] Simons, M., M. Wang, at al. (1991). “Human nonmuscle myosin heavy chains are encoded by two genes located on different chromosomes.” Circ Res 69(2): 530-9.
[0254] Solomon, S. D., A. A. Geisterfer-Lowrance, et al. (1990). “A locus for familial hypertrophic cardiomyopathy is closely linked to the cardiac myosin heavy chain genes, CRI-L436, and CRI-L329 on chromosome 14 at q11-q12.” Am J Hum Genet 47(3): 389-94.
[0255] Strausberg, R. L., E. A. Feingold, et al. (2002). “Generation and initial analysis of more than 15,000 full-length human and mouse cDNA sequences.” Proc Natl Acad Sci USA 99(26): 16899-903.
[0256] Venter, J. C., M. D. Adams, et al. (2001). “The sequence of the human genome.” Science 291(5507): 1304-51.
[0257] Volkmann, D., T. Mori, et al. (2003). “Unconventional myosins of the plant-specific class VIII: endocytosis, cytokinesis, plasmodesmata/pit-fields, and cell-to-cell coupling.” Cell Biol Int 27(3): 289-91.
[0258] Walsh, T., V. Walsh, et al. (2002). “From flies' eyes to our ears: mutations in a human class III myosin cause progressive nonsyndromic hearing loss DFNB30.” Proc Natl Acad Sci USA 99(11): 7518-23.
[0259] Winters, L. M., M. M. Briggs, et al. (1998). “The human extraocular muscle myosin heavy chain gene (MYH13) maps to the cluster of fast and developmental myosin genes on chromosome 17.” Genomics 54(1): 188-9.
[0260] Yang, C. H., J. Szeliga, et al. (2005). “Identification of the surfactant protein A receptor 210 as the unconventional myosin 18A.” J Biol Chem 280(41): 34447-57.
[0261] Zhang, L., J. D'Costa, et al. (2006). “Identification of a region on the outer surface of the CBFbeta-SMMHC myeloid oncoprotein assembly competence domain critical for muitimerization.” Oncogene 25(55): 7289-96.

### REFERENCES CITED IN EXAMPLE 1

[0262] 1. S. Agarwal, S. Cämmerer, S. Filali, W. Fröhner, J. Knöll, M. P. Krahl, K. R. Reddy, H.-J. Knölker, Curr. Org. Chem. 2005, 9, 1601.
[0263] 2. S. Agarwal, H. J. Knölker, Org. Biomol. Chem. 2004, 2, 3060.
[0264] 3. a) V. M. Dembitsky, Russ. J. Bioorg. Chem. 2002, 28, 170. b) G. W. Gribble in The Handbook of Environmental Chemistry; Springer-Verlag, Berlin, 2003; Vol. 3, p. 1.
[0265] 4. a) H.-J. Knölker, K. R. Reddy, Chem. Rev. 2002, 102, 4303. b) H.-J. Knölker, Top. Curr. Chem. 2005, 244, 115.

### REFERENCES CITED IN EXAMPLE 2

[0266] 1. Burkholder, P. R., Pfister, R. M. & Leitz, F. H. Production of a pyrrole antibiotic by a marine bacterium. Appl Microbiol 14, 649-53 (1966).
[0267] 2. Laatsch, H. et al. Structure-activity relationships of phenyl- and benzoylpyrroles. Chem Pharm Bull (Tokyo) 43, 537-46 (1995).
[0268] 3. Ohri, R. V. et al. A Re(V)-catalyzed C—N bond-forming route to human lipoxygenase inhibitors. Org Lett 7, 2501-4 (2005).
[0269] 4. Boldogh, I. R., Ramcharan, S. L., Yang, H. C. & Pon, L. A. A type V myosin (Myo2p) and a Rab-like G-protein (Ypt11p) are required for retention of newly inherited mitochondria in yeast cells during cell division. Mol Biol Cell 15, 3994-4002 (2004).
[0270] 5. Itoh, T., Toh, E. A. & Matsui, Y. Mmr1p is a mitochondrial factor for Myo2p-dependent inheritance of mitochondria in the budding yeast. Embo J 23, 2520-30 (2004).
[0271] 6. Itoh, T., Watabe, A., Toh, E. A. & Matsui, Y. Complex formation with Ypt11p, a rab-type small GTPase, is essential to facilitate the function of Myo2p, a class V myosin, in mitochondrial distribution in Saccharomyces cerevisiae. Mol Cell Biol 22, 7744-57 (2002).
[0272] 7. Westermann, B. & Neupert, W. Mitochondria-targeted green fluorescent proteins: convenient tools for the study of organelle biogenesis in Saccharomyces cerevisiae. Yeast 16, 1421-7 (2000).
[0273] 8. Mnaimneh, S. et al. Exploration of essential gene functions via titratable promoter alleles. Cell 118, 31-44 (2004).
[0274] 9. Kron, S. J. & Spudich, J. A. Fluorescent actin filaments move on myosin fixed to a glass surface. Proc Natl Acad Sci USA 83, 6272-6 (1986).
[0275] 10. Durrwang, U. et al. Dictyostelium myosin-1E is a fast molecular motor involved in phagocytosis. J Cell Sci 119, 550-8 (2006).
[0276] 11. Woodward, S. K., Geeves, M. A. & Manstein, D. J. Kinetic characterization of the catalytic domain of Dictyostelium discoideum myosin. Biochemistry 34, 16056-64 (1995).
[0277] 12. Manstein, D. J. & Hunt, D. M. Overexpression of myosin motor domains in Dictyostelium: screening of transformants and purification of the affinity tagged protein. J Muscle Res Cell Motil 16, 325-32 (1995).
[0278] 13. Lehrer, S. S. & Kerwar, G. Intrinsic fluorescence of actin. Biochemistry 11, 1211-7 (1972).
[0279] 14. Fedorov, R., Witte, G., Urbanke, C., Manstein, D. J. & Curth, U. 3D structure of Thermus aquaticus single-stranded DNA-binding protein gives insight into the functioning of SSB proteins. Nucleic Acids Res 34, 6708-17 (2006).
[0280] 15. Manstein, D. J. & Hunt, D. M. Overexpression of myosin motor domains in Dictyostelium: screening of transformants and purification of the affinity tagged protein. J. Mus. Res. Cell Motil. 16, 325-332 (1995).
[0281] 16. Agarwal, S. & Knolker, H. J. A novel pyrrole synthesis. Org Biomol Chem 2, 3060-2 (2004).
[0282] 17. Brunger, A. T. et al. Crystallography & NMR system: A new software suite for macromolecular structure determination. Acta Crystallographica Section D-Biological Crystallography 54, 905-21 (1998).
[0283] 18. Schmidt, M. W. et al. The General Atomic and Molecular Electronic Structure System. J. Comput. Chem. 14, 1347-1363 (1993).
[0284] 19. Furch, M., Geeves, M. A. & Manstein, D. J. Modulation of actin affinity and actomyosin adenosine triphosphatase by charge changes in the myosin motor domain. Biochemistry 37, 6317-26 (1998).
[0285] 20. Uyeda, T. Q., Kron, S. J. & Spudich, J. A. Myosin step size. Estimation from slow sliding movement of actin over low densities of heavy meromyosin. J Mol Biol 214, 699-710 (1990).
[0286] 21. Peschke, J. D., Hanefeld, U. & Laatsch, H. Biosynthesis of the marine antibiotic pentabromopseudilin. 2. The pyrrole ring. Biosci Biotechnol Biochem 69, 628-30 (2005).2
[0287] 22. Lehrer, S. S., and Kerwar, G. (1972) Intrinsic fluorescence of actin, Biochemistry 11, 1211-1217.
[0288] 23. Kron, S. J. & Spudich, J. A. Fluorescent actin filaments move on myosin fixed to a glass surface. Proc. Natl. Acad. Sci. USA 83, 6272-6 (1986).

The application's sequence listing, which the Patent Office published only in electronic form, follows.

SEQUENCE LISTING (109 sequences)

SEQ ID NO: 1 - DNA, 6351 bp, Dictyostelium discoideum
  misc_feature (1)..(6351): Myosin-2
atgaatccaattcatgatagaacttcagattatcacaaatacttaaaagttaaacaaggtgattctgatttatttaaacttactgtttcagataagagatacatttggtataatccagatccaaaagaaagagattcatatgaatgtggtgaaattgtttcagaaacctctgattctttcacattcaaaaccgttgatggtcaagacagacaagtcaaaaaggatgatgccaatcaacgtaatccaatcaaattcgatggtgtcgaagatatgtctgaattatcatacctcaatgaaccagcagttttccacaatctccgtgttcgttacaatcaagatttaatttacacctattcaggtctctttttggttgccgtcaatccattcaagagaattccaatctacactcaagagatggttgatatcttcaaaggtcgtagaagaaatgaagttgccccacatattttcgccatttctgatgttgcctatcgttcaatgttagatgatcgtcaaaatcaatcactcttaatcactggtgaatctggtgctggtaagactgaaaacaccaaaaaggtcattcaatatcttgcatctgtcgctggtcgtaatcaagccaatggtagtggtgtattggaacaacaaattctccaagccaatccaatccttgaagcttttggtaatgccaaaaccacccgtaacaacaattcatctcgtttcggtaaattcattgaaattcaattcaacagtgctggtttcattagtggtgcttcaattcaatcctaccttttagagaaatcacgtgtcgttttccaatctgaaaccgaacgtaattatcacattttctatcaactcttagctggtgccaccgccgaagaaaagaaagctcttcacttggctggtccagaatcattcaactacttaaatcaaagtggttgtgttgatatcaaaggtgtctctgatagtgaagaattcaaaatcactcgtcaagctatggacattgttggtttctcacaagaagaacaaatgtcaatctttaagatcattgctggtatcttacatttaggtaacatcaaattcgaaaaaggtgctggtgaaggtgctgtcctcaaagacaaaaccgccctcaacgctgcttcaaccgtctttggtgtcaatccatcagtccttgaaaaggctctcatggaaccacgtattttagccggtcgtgatttagttgctcaacatctcaacgttgaaaaatcctcatcatcaagagacgctcttgtcaaagctctctatggtcgtcttttcctctggttggtcaaaaagatcaacaatgtcctctgtcaagagagaaaagcttactttattggtgttttggatatttcaggttttgaaattttcaaagtcaattcattcgaacaattatgtatcaattataccaatgaaaaactccaacaattcttcaatcaccatatgttcaaattggaacaagaagaatatcttaaagagaaaatcaattggactttcatcgattttggtcttgattcacaagccactatcgatttaattgatggtcgtcaaccaccaggtattttagctcttttggatgaacaatctgttttcccaaatgccaccgataatactttaatcaccaaactccacagtcactttagcaagaagaacgccaaatacgaagaaccacgtttctccaaaaccgaatttggtgttacccattatgctggtcaagtcatgtatgagattcaagattggttagaaaagaacaaagatccattacaacaagatctcgaactttgcttcaaagattcatcagacaacgttgtcaccaaacttttcaatgatccaaacattgccagtcgtgcaaagaaaggtgcaaactttatcactgtcgccgctcaatacaaggaacaattagcctcactcatggccacccttgaaaccaccaacccacatttcgttcgttgtatcattccaaacaacaaacaattaccagccaaactcgaagataaagttgtcctcgaccaattacgttgcaatggtgtcctcgaaggtattcgtattactcgtaaaggtttcccaaatcgtattatctatgccgatttcgtcaaacgttactatttattagctccaaacgttccaagagacgctgaagactcacaaaaagccaccgatgctgttctcaaacatcttaacattgatccagaacaatatcgtttcggtatcaccaagattttcttccgtgccggtcaattagctcgtattgaagaagctcgtgaacaacgtatctctgaaatcatcaaagccattcaagctgccactcgtggttggatcgctcgtaaagtctacaaacaagcacgtgaacacactgttgctgctcgtatcatccaacaaaatctccgtgcttacattgatttcaaatcatggccatggtggaaactcttctcaaaggctcgtccattattaaagagaagaaactttgaaaaggaaatcaaagaaaaggaaagagaaatcttagaactcaaatctaatctcaccgactctaccactcaaaaggataaattagagaaatcactcaaagatactgaatccaatgtactcgatctccaacgtcaactcaaagctgaaaaagaaaccctcaaagctatgtacgatagcaaggatgccttagaagctcaaaaacgtgaattagaaatccgtgttgaagatatggaatctgaactcgacgaaaagaaattagctttggaaaacctccaaaaccaaaaacgttcagtcgaagaaaaagtcagagacttggaagaagaattacaagaggaacaaaaattacgtaatacccttgaaaaattaaagaagaaatacgaagaggaattagaagaaatgaaacgtgtcaatgacggtcaatctgataccatctctcgtttagaaaaaatcaaggatgaattacaaaaagaagttgaagaattaactgaaagcttctctgaagaatccaaagataaaggtgttttagaaaagactcgtgtcagattacaaagtgaattggatgatttaaccgtaagattagatagtgaaaccaaagacaaatctgaattactccgtcaaaagaagaaactcgaagaagaactcaaacaagttcaagaagctctcgctgctgaaactgctgctaaattagctcaagaagctgccaacaagaaattacaaggtgaatacactgaattaaacgaaaaattcaactctgaagtcactgctcgttcaaatgttgaaaaatcaaagaagaccctcgaaagtcaattggttgccgtcaacaacgaattagatgaagagaagaagaatcgtgatgcccttgaaaagaagaagaaagctttagacgctatgttagaggaaatgaaagatcaattagaatccactggtggtgaaaagaaatcactctatgatctcaaagttaaacaagaatcagatatggaggctttacgtaatcaaatctctgaactccaatcaactattgccaaattagaaaagattaaatccactttagaaggtgaagttgctcgtttacaaggtgaattagaagctgaacaattagccaaatccaacgttgaaaaacaaaagaagaaggttgaattagatttggaagataaatctgctcaattagctgaagaaaccgccgccaaacaagctttagataaattaaagaagaaattagaacaagaattatctgaagttcaaactcaactctctgaagccaacaacaagaatgtcaactctgattccaccaacaaacatttggaaacctctttcaataatctcaaattagaattggaagctgaacaaaaagccaaacaagctcttgaaaagaaacgtctcggtttagaatctgaattaaaacatgtcaatgaacaattggaagaagaaaagaaacaaaaagaatccaacgaaaaacgtaaagttgatttagaaaaggaagtctctgaactcaaagaccaaattgaagaagaagttgcctccaagaaagctgtcactgaagccaagaacaagaaagaatctgaactcgatgaaatcaagagacaatatgctgatgttgtttcatctcgtgataaatcagtcgaacaattaaagaccttacaagccaagaatgaagaattaagaaacactgctgaagaagctgaaggtcaattagatcgtgctgaaagaagcaagaagaaagctgaattcgatttagaagaagccgtcaagaatttggaagaagaaaccgccaagaaagttaaagctgaaaaagccatgaagaaagctgaaactgactatcgttcaaccaaatctgaattggatgatgccaagaacgtctcatctgaacaatacgttcaaatcaaacgtctcaatgaagaactctctgaattacgtagtgtcttggaagaagctgatgaacgttgtaactctgccatcaaagcaaagaaaaccgctgaatctgctttagaatcattgaaagatgaaattgatgctgccaacaacgccaaagctaaagctgaaagaaaatccaaagaattagaagttcgtgtcgctgaattagaagaatcattggaagataaatctggtaccgtcaatgttgaattcattcgtaagaaggatgctgaaatcgatgatttacgtgctcgtctcgacagagaaactgaaagtcgtatcaaatctgatgaagataagaagaacactcgtaaacaatttgctgatttagaagctaaggttgaagaagctcaacgtgaagttgtcaccatcgatagattaaagaagaaactcgaatctgatatcatcgatttatcaactcaattggatactgaaaccaaatctcgtatcaagattgaaaagagcaagaagaaactcgaacaaactctcgctgaaagaagagccgctgaagaaggttcatccaaagctgctgatgaagaaattcgtaaacaagtctggcaagaggttgatgagttacgtgctcaattagatagtgaacgtgctgctctcaatgcttctgaaaagaagatcaaatctttggtcgccgaagtcgatgaagtcaaggaacaattagaagatgaaatcctcgccaaagacaaattagtcaaagccaaacgtgccctcgaagttgaattagaggaagtcagagaccaattagaagaggaagaagattctcgttcagaattagaagacagcaaacgtcgtctcactactgaagtcgaagatatcaagaagaaatacgatgctgaagtcgaacaaaacaccaaattagatgaagccaagaagaaactcactgatgatgttgatactctcaagaaacaattggaagatgaaaagaagaaattgaacgaatctgaacgtgccaagaaacgtttagaatctgaaaatgaagatttccttgccaaacttgatgctgaagttaagaatcgttcacgtgctgaaaaggatcgtaagaaatacgaaaaggatctcaaggataccaaatacaaattaaacgacgaagctgccaccaagactcaaaccgaaattggtgccgccaaactcgaagatcaaatcgatgaattacgttccaaacttgaacaagaacaagccaaagccactcaagccgataagagtaagaagactttggaaggtgaaattgacaacttacgtgctcaaatcgaagatgaaggtaagatcaagatgagattagaaaaagaaaaacgtgctctcgaaggtgaattagaagaattaagagaaaccgttgaagaagctgaagactctaaatctgaagctgaacaatccaaacgtttagtcgaattagaattagaagatgctcgtcgtaacctccaaaaagaaatcgatgccaaagaaatcgctgaagatgccaaatctaacctccaacgtgaaatcgtcgaagccaaaggtcgtctcgaagaagaatccatcgctcgtaccaactctgatcgttcaagaaagagactcgaagctgaaattgatgccctcactgctcaagttgatgctgaacaaaaagccaagaatcaacaaatcaaagaaaacaagaagatcgaaaccgaactcaaagaatacagaaagaaattcggcgaatcagaaaagaccaagaccaaagaattcctcgttgtcgaaaaactcgaaacagattacaagagagccaagaaagaagctgctgatgaacaacaacaacgtcttactgttgaaaacgatctccgtaaacacctcagtgaaatctcattactcaaagatgccattgataagttacaacgtgatcacgataagaccaaacgtgaattggaaacagaaactgccagcaaaatcgaaatgcaaagaaagatggccgatttctttggtggtttcaaagcttaa

SEQ ID NO: 2 - protein, 2116 aa, Dictyostelium discoideum
  MISC_FEATURE (1)..(2116): Myosin-2
MNPIHDRTSDYHKYLKVKQGDSDLFKLTVSDKRYIWYNPDPKERDSYECGEIVSETSDSFTFKTVDGQDRQVKKDDANQRNPIKFDGVEDMSELSYLNEPAVFHNLRVRYNQDLIYTYSGLFLVAVNPFKRIPIYTQEMVDIFKGRRRNEVAPHIFAISDVAYRSMLDDRQNQSLLITGESGAGKTENTKKVIQYLASVAGRNQANGSGVLEQQILQANPILEAFGNAKTTRNNNSSRFGKFIEIQFNNAGFISGASIQSYLLEKSRVVFQSETERNYHIFYQLLAGATAEEKKALHLAGPESFNYLNQSGYVDIKGVSDSEEFKITRQAMDIVGFSQEEQMSIFKIIAGILHLGNIKFEKGAGEGAVLKDKTALNAASTVFGVNPSVLEKALMEPRILAGRDLVAQHLNVEKSSSSRDALVKALYGRLFLWLVKKINNVLCQERKAYFIGVLDISGFEIFKVNSFEQLCINYTNEKLQQFFNHHMFKLEQEEYLKEKINWTFIDFGLDSQATIDLIDGRQPPGILALLDEQSVFPNATDNTLITKLHSHFSKKNAKYEEPRFSKTEFGVTHYAGQVMYEIQDWLEKNKDPLQQDLELCFKDSSDNVVTKLFNDPNIASRAKKGANFITVAAQYKEQLASLMATLETTNPHFVRCIIPNNKQLPAKLEDKVVLDQLRCNGVLEGIRITRKGFPNRIIYADFVKRYYLLAPNVPRDAEDSQKATDAVLKHLNIDPEQYRFGITKIFFRAGQLARIEEAREQRISEIIKAIQAATRGWIARKVYKQAREHTVAARIIQQNLRAYIDFKSWPWWKLFSKARPLLKRRNFEKEIKEKEREILELKSNLTDSTTQKDKLEKSLKDTESNVLDLQRQLKAEKETLKAMYDSKDALEAQKRELEIRVEDMESELDEKKLALENLQNQKRSVEEKVRDLEEELQEEQKLRNTLEKLKKKYEEELEEMKRVNDGQSDTISRLEKIKDELQKEVEELTESFSEESKDKGVLEKTRVRLQSELDDLTVRLDSETKDKSELLRQKKKLEEELKQVQEALAAETAAKLAQEAANKKLQGEYTELNEKFNSEVTARSNVEKSKKTLESQLVAVNNELDEEKKNRDALEKKKKALDAMLEEMKDQLESTGGEKKSLYDLKVKQESDMEALRNQISELQSTIAKLEKIKSTLEGEVARLQGELEAEQLAKSNVEKQKKKVELDLEDKSAQLAEETAAKQALDKLKKKLEQELSEVQTQLSEANNKNVNSDSTNKHLETSFNNLKLELEAEQKAKQALEKKRLGLESELKHVNEQLEEEKKQKESNEKRKVDLEKEVSELKDQIEEEVASKKAVTEAKNKKESELDEIKRQYADVVSSRDKSVEQLKTLQAKNEELRNTAEEAEGQLDRAERSKKKAEFDLEEAVKNLEEETAKKVKAEKAMKKAETDYRSTKSELDDAKNVSSEQYVQIKRLNEELSELRSVLEEADERCNSAIKAKKTAESALESLKDEIDAANNAKAKAERKSKELEVRVAELEESLEDKSGTVNVEFIRKKDAEIDDLRARLDRETESRIKSDEDKKNTRKQFADLEAKVEEAQREVVTIDRLKKKLESDIIDLSTQLDTETKSRIKIEKSKKKLEQTLAERRAAEEGSSKAADEEIRKQVWQEVDELRAQLDSERAALNASEKKIKSLVAEVDEVKEQLEDEILAKDKLVKAKRALEVELEEVRDQLEEEEDSRSELEDSKRRLTTEVEDIKKKYDAEVEQNTKLDEAKKKLTDDVDTLKKQLEDEKKKLNESERAKKRLESENEDFLAKLDAEVKNRSRAEKDRKKYEKDLKDTKYKLNDEAATKTQTEIGAAKLEDQIDELRSKLEQEQAKATQADKSKKTLEGEIDNLRAQIEDEGKIKMRLEKEKRALEGELEELRETVEEAEDSKSEAEQSKRLVELELEDARRNLQKEIDAKEIAEDAKSNLQREIVEAKGRLEEESIARTNSDRSRKRLEAEIDALTAQVDAEQKAKNQQIKENKKIETELKEYRKKFGESEKTKTKEFLVVEKLETDYKRAKKEAADEQQQRLTVENDLRKHLSEISLLKDAIDKLQRDHDKTKRELETETASKIEMQRKMADFFGGFKA

SEQ ID NO: 3 - DNA, 3018 bp, Dictyostelium discoideum
  misc_feature (1)..(3018): Myosin-1E
atgattccaaagacaaaagcagaaggtgtaccagattttgttttgttaaatcaaatcacagaaaatgcattcatagagaatttaactatgagacataaatcagacaatatctacacatatattggtgatgtagtaatctcaaccaatccattcaaaaatcttaatatctataaagaaagtgatattaaagcatacaatggtagatataaatatgaaatgccaccacatatttatgcacttgcaaatgatgcataccgttcaatgagacaaagtcaagagaatcaatgtgttattatttcaggtgaatcaggtgctggtaaaactgaagcaagtaaaaagattatgcaatttttaacatttgttagtagtaatcaaagtccaaatggtgaaagaatttcaaagatgttattagattccaatccattattggaagcatttggtaatgcaaaaactcttagaaatgataattcatcacgttttggtaaatatatggaaatgcaattcaatgcagttggttcaccaattggtggtaaaattacaaattatctcttggaaaaatcaagagttgttggtagaactcaaggtgaaagaagttttcatatcttttatcaaatgttaaaaggtttatcacaatcaaaattaaatgaacttggattaacaccaaatgcaccagcatatgaatatcttaaaaagagtggttgttttgatgtttcaactattgatgatagtggtgaatttaaaattattgtaaaagcaatggaaacattaggattaaaagaaagtgaccaaaattcaatttggagaattttagcagcaattttacatattggtaatattacatttgcagaagcagcagaacaaagaactggtactacaacagtgaaagtatcagatactaaatcattggcagcagcagcatcatgtttaaagacagatcaacagtcattatcgattgcattatgttatcgttcaattagtacaggtgttggtaaacgttgttcagttatttcagtaccaatggattgtaatcaagcagcctactctagggatgcacttgcaaaggcattgtatgaacgtttattcaattggttagtcagcaaaatcaataccattatcaattgtacaacagagaagggaccagtgattggtattcttgatatctatggttttgaggtttttcaaaataatagtttcgaacaattgaatattaatttctgtaatgagaaattacaacaactattcatagagttgacattgaagtctgagcaagaggagtacgttagggagggtatcgagtggaagaatatcgaatactttaataataaaccaatttgtgagttaattgaaaagaaaccaattggtttgatttcgttattggatgaggcatgtttgattgccaagagcactgatcaaacttttttagattcaatttgtaaacaatttgaaaagaatccacatttgcaatcgtatgttgttagtaaggatagatcgattggggatacatgtttccgtttgaagcattatgctggcgatgtaacttatgacgttagaggtttcctcgataagaataaggataccctattcggtgatttaatatcaagtatgcaaagtagttcagatccattggttcaaggcttattcccaccaactagaccagaggatagtaagaagagaccagagactgccggttcccaatttagaaatgcaatgaatgctctcatcactacattgttggcttgttcaccacattacgttcgttgtattaaatcaaatgataataaacaagctggtgtaattgatgaggatcgtgtacgtcatcaagttcgttatcttggtttacttgaaaatgttagagttagaagagcaggtttcgcaggtagaattgaatataccagattctacaatcgttataaaatgctttgtaaaaagacatggccatcatttaatggcacagcaaaacaagccactgaattaatcctccaacaacataatatcgataaagaggaaattcgtatgggtaaaaccaaagtattcatccgtaatccaaccactctattctattttgaagagaagagggagcttgaaatgccaagaattgtaacattaattcaaaagacatggagaggttatagagcacgttccaaatggaatcaaagaaaagctgccattaaaatccagttattctatcgtagctatcgttataagaaatggttcagagagttacatcgtgcttttaaagatgtcgctcgtgatccacaatggggtaaacaagtattttggcccaaacatccatccatcttggatagagctgtccaattaactcacaaaattcacaattgttggagagcagagaaaatgattctttctttgggtgccggtcaaaatcatatgagacaaaaggttatggcttacgatattttccatggtaaaaagaaatgggacttccgtcgtcatttcgatgctgattatttggagaaaccatccaatccaaatcaacaaaaatacgtattggccatgcaaaatcttttctcaacttatggtgacacagaggtactctttgccgattacgttatcaaagtcaatccaaagggtgtgccacaacgtcgtggtatcgttgtcactggtacaaacatctataaacacgatccaaagaattacaaagtaaagaaatggggtactccattggttgatgtaacttcaatctcaatttcaccaatggctgatactttcttggttttacattgtaaagctccacaaagagatttcgtattggatttaggttgtaatggttatgaagctgtatctgaaattacaactgtaatcgttcaacaagtcttaaaattaactggtgtcaaattatctgttcaattcactagttcaatcacttataataatgctcgtccaaaaggttctgatacaattttaacttttgctccaattaataatgatccaaaattaattggttctcaatttaaaaaaggtaaaggtaaccaagcaacaatccaatttaaagattaa

SEQ ID NO: 4 - protein, 1005 aa, Dictyostelium discoideum
  MISC_FEATURE (1)..(1005): Myosin-1E
MIPKTKAEGVPDFVLLNQITENAFIENLTMRHKSDNIYTYIGDVVISTNPFKNLNIYKESDIKAYNGRYKYEMPPHIYALANDAYRSMRQSQENQCVIISGESGAGKTEASKKIMQFLTFVSSNQSPNGERISKMLLDSNPLLEAFGNAKTLRNDNSSRFGKYMEMQFNAVGSPIGGKITNYLLEKSRVVGRTQGERSFHIFYQMLKGLSQSKLNELGLTPNAPAYEYLKKSGCFDVSTIDDSGEFKIIVKAMETLGLKESDQNSIWRILAAILHIGNITFAEAAEQRTGTTTVKVSDTKSLAAAASCLKTDQQSLSIALCYRSISTGVGKRCSVISVPMDCNQAAYSRDALAKALYERLFNWLVSKINTIINCTTEKGPVIGILDIYGFEVFQNNSFEQLNINFCNEKLQQLFIELTLKSEQEEYVREGIEWKNIEYFNNKPICELIEKKPIGLISLLDEACLIAKSTDQTFLDSICKQFEKNPHLQSYVVSKDRSIGDTCFRLKHYAGDVTYDVRGFLDKNKDTLFGDLISSMQSSSDPLVQGLFPPTRPEDSKKRPETAGSQFRNAMNALITTLLACSPHYVRCIKSNDNKQAGVIDEDRVRHQVRYLGLLENVRVRRAGFAGRIEYTRFYNRYKMLCKKTWPSFNGTAKQATELILQQHNIDKEEIRMGKTKVFIRNPTTLFYFEEKRELEMPRIVTLIQKTWRGYRARSKWNQRKAAIKIQLFYRSYRYKKWFRELHRAFKDVARDPQWGKQVFWPKHPSILDRAVQLTHKIHNCWRAEKMILSLGAGQNHMRQKVMAYDIFHGKKKWDFRRHFDADYLEKPSNPNQQKYVLAMQNLFSTYGDTEVLFADYVIKVNPKGVPQRRGIVVTGTNIYKHDPKNYKVKKWGTPLVDVTSISISPMADTFLVLHCKAPQRDFVLDLGCNGYEAVSEITTVIVQQVLKLTGVKLSVQFTSSITYNNARPKGSDTILTFAPINNDPKLIGSQFKKGKGNQATIQFKD

SEQ ID NO: 5 - DNA, 6925 bp, Gallus gallus
  misc_feature (1)..(6925): myosin VA (heavy chain 12, myosin) (MYO5A)
ccgccaggtagcagcaatatggcgcgccgcgccgccgcctgagcatcttcccgccgccgccgcccgcccgcccgccgcagcgcggccgcgccccgcgccatggccgcctccgagctgtacaccaagtatgccagggtttggatccctgacccagaggaggtctggaagtcagcagaacttcttaaagattataaacctggagataaagttttgcagcttcgacttgaagagggcaaggacctagaatattgcctcgaccccaagactaaggaactcccccccttgcgaaaccctgacatccttgttggtgaaaatgacctcactgcgctcagttatctccatgaacctgctgtgctacacaacctcaaagttcgatttatagactctaaactcatttatacctattgtggtatcgtcttagtggcaataaacccttatgaacagctgcctatctatggcgaagatatcatcaatgcgtacagtggccaaaatatgggggatatggatccacatatctttgcagtggcagaagaggcatacaagcagatggccagagatgagcgaaatcagtcaatcattgtaagtggagaatctggggcaggaaagacggtttctgccaagtatgccatgaggtactttgccacggtcagtggatctgccagtgaagccaatgttgaggagaaagtcttggcttcaaaccccataatggagtccattggaaatgccaaaacaacgaggaatgacaacagcagtcgctttgggaaatacattgaaattggttttgacaagaggtatcgaatcattggtgctaacatgagaacttatctcttggagaaatcaagagtggtatttcaggcagaagaggagaggaattaccacatcttttaccaactctgtgcctctgcagcattacctgaatttaaaactctacgattagggaatgcaaattactttcattatacaaagcaaggtggaagccctgtgattgatggcattgatgatgctaaggaaatggtaaacaccagacaagcctgcactttgctagggattagtgattcctaccagatgggaattttccgaatccttgctggcatccttcacttgggcaacgtggagtttgcatctcgggattctgacagctgcgccattcctcccaaacatgatcccctcaccatcttctgtgacctcatgggcgtggactatgaagagatggctcactggctttgccataggaagctcgcaactgccactgaaacctacatcaagccaatttctaaacttcatgccatcaatgccagagatgcacttgccaaacatatctatgctaatctctttaactggattgtagatcatgtgaacaaagcccttcattctactgtaaagcaacattctttcattggagtactggacatttatggatttgagacatttgaaatcaacagcttcgaacagttctgtatcaactatgccaatgagaaactgcagcagcagttcaatatgcatgtgtttaagctggaacaagaagaatacatgaaagaacaaataccatggaccttgattgatttctatgacaatcagccttgcatcaacctcatagaagccaaaatgggagttctggatctgttagatgaggaatgcaagatgccaaaaggctcggatgacacttgggcccaaaaactgtacaatactcatttgaataaatgtgccctctttgaaaaaccacgtttatccaataaggcttttatcatcaaacactttgctgacaaggtggaatatcagtgtgaaggctttctggaaaagaataaggatacagtttatgaagagcaaattaaggtcctaaaatcaagtaagaagtttaagctgctaccagaattattccaggatgaggagaaggccatcagtcccacgtcagccaccccttcaggccgtgtgccattgtctcgaactcctgtaaaaccagccaaggccaggccaggtcaaactagcaaggagcataagaaaactgtggggcatcagtttcgaaactctcttcatctgctgatggaaaccctgaacgccacaactccacactatgtgcgctgtattaagcctaacgacttcaagtttccattcacatttgacgaaaagcgagcagtgcagcagctgagagcttgtggtgtcctggagaccatccgaatcagtgcagctggtttcccctccaggtggacgtaccaagagttcttcagccgttaccgtgttctcatgaagcagaaagatgtccttagtgaccgaaaacagacatgtaaaaatgtcctggagaagctgattctggacaaggataagtaccagtttggtaagacaaaaatatttttccgggctggtcaagtagcctatcttgaaaaaataagggcagataagttgagagctgcctgtatccgcatccaaaagacaatccgaggctggctgatgagaaagaagtacatgcgtatgaggagggctgccatcaccattcagagatatgtcagagggcaccaagcacgatgctatgccacattcctgcggagaacacgggctgccatcattattcagaagttccagcgtatgtatgtggtccgcaaaagataccagtgcatgcgagatgctactattgctcttcaagctctcttaagaggttacctggtcaggaacaagtaccaaatgatgcttcgagagcacaagtctattattattcagaaacatgtaagaggctggctggctcgagtgcactatcataggaccttgaaggcaattgtttacttgcaatgctgttaccggcgcatgatggccaagagggagctgaagaagctgaagatagaggctcggtctgtggaacgctacaagaagcttcacattggcttggagaacaagatcatgcagctgcagcggaaaattgatgaacagaacaaagagtacaaatctctgctggagaagatgaataacctggagatcacatacagtacagagacagagaagcttcggagtgatgtggagaggcttcggatgagtgaggaggaggctaagaatgcaaccaaccgtgttctcagccttcaggaagagattgccaagctccggaaggagctgcaccagactcagactgagaagaagacaattgaggaatgggcagacaaatacaaacatgaaactgagcagctggtgtcggaactgaaagagcagaacacattactgaaaacagaaaaggaggagctgaaccgccgtatccatgaccaagcaaaggagataacagagacaatggagaagaagctagtggaggaaacaaagcagttggagctagacctgaacgatgagaggttacggtatcagaacctgctgaatgagttcagccgcttggaggagcggtatgatgatctcaaggatgaaatgaacttaatggtgagcatccccaagcctggacacaaaagaacggattcaactcacagtagcaatgaatctgaatatacttttagctctgagatcacagaagcagaagacttaccactgaggatggaggagccaagtgagaaaaaggcaccattggacatgtctctgttcctcaagctgcagaaacgggttacagagctggagcaagaaaagcaatccctgcaggatgaactggacagaaaggaagaacaggctcttcgtgccaaagctaaggaggaggaaaggcctccaataagaggtgcagagttggagtatgagtcgctcaagcgtcaagagcttgaatctgagaataaaaaactgaagaatgagttgaacgagctgcagaaggccctcacagaaacacgagctccagaggtaactgctcctggtgctccagcatacagagtcctcctggatcagctgacttcagtaagcgaagaactggaagtacgcaaggaagaagtgcttatcctgaggtctcagttggttagccagaaagaggctattcaacccaaggaggacaagaacaccatgacagattctacaatcctcttggaggatgtgcagaagatgaaagacaaaggggaaatagcacaggcgtatattggactgaaggaaaccaacaggctgctggagtctcagctgcagtcgcagaagaagagccacgagaatgagctggagtcactgcgaggtgagatccaaagtctgaaggaagaaaacaatcgccagcagcagctcttggcacagaatctgcagctgcccccggaggcccgcattgaagccagtctgcagcatgagatcacccggctgacaaacgagaacttggatttaatggaacaacttgaaaagcaagacaaaactgttcgcaaattaaagaagcaattgaaggtatttgctaagaagattggtgaacttgaagtgggtcagatggagaacatatcacctggacaaatcattgatgaacctattcgtccagttaacattccacggaaggaaaaggacttccaggggatgttggagtataagaaagaggatgaacaaaagctagtcaagaatcttatattagagctgaaaccacgcggggtagcagtcaacctgattccaggactaccagcatatattttgttcatgtgtgtacgccacgcagattaccttaacgatgaccagaaagtgcgttcattgttgacctccactatcaatggcatcaaaaaagtgctgaagaaaagaggtgatgacttcgaaacggtgtctttctggctgtccaacacctgccggtttttgcactgtttgaagcagtacagcggagaagaggggtttatgaagcataatacacctcgtcagaatgagcactgcctcactaattttgacttagctgaatacagacaagtcctgagtgacttggctattcagatctaccagcaactggtccgcgtgttggagaacattctgcaacccatgattgtttctggaatgctggagcacgagactatccagggtgtctcaggggtgaaaccaacagggctgcggaagagaacatccagcattgctgatgaaggaacctacactttggactccattattcgacagttgaactctttccattccgtgatgtgtcagcatggaatggatccagagctgatcaaacaggttgtcaagcagatgttctacatcattggggctgtaacacttaataatcttctcctgcgcaaggacatgtgttcatggagcaaaggaatgcagataaggtacaatgtgagtcaacttgaagaatggctacgtgataaaaatctaatgaacagtggggccaaagaaacactggagcccctcatacaggctgcacagttgttgcaagtgaaaaagaaaacagatgaagatgcagaagccatttgttcaatgtgcaatgcactgactactgcccagattgtgaaagtactgaatttgtatactccagttaatgaatttgaagagagagtcttggtatcgtttatacgtacaatacagctgcgtctgcgagacaggaaggactctcctcaactgctcatggatgctaaacacatctttcctgttacttttccatttaatccatcctccctggcattagaaaccatccagatcccagccagtttggggctgggtttcatatcacgtgtctgatcctaaggctgttctgtcagtgctagatggagaattgtttgcctgatatcattacccattaaaacatagtgagccactgaaaacacatttttgaacaaacagtctccgtatgctcagatttgttgtaaaagtagctgggaaactacacaacagcaccacagattgaaggctgatagaaagatgtgcatttgtgttcagtcattgcacttacgaggacattactgattcatacgtttccagagatggaaattgggtttggacaaaaattgtgtcttcagctgtttagagacgtttttagatctttagtaacatatttaaatagtgtaaattaaactccatgtataaccttctcatgggcagggaccaatggggacagtcccagtccccacatggaagacgtaaaagtaaggcattttgtagtagaatatgcagttacttgggagcctgttacttttaatttgtaaaaactggaatggagaagcaaaaacttgcaatatataacatgatttcttaaaccacttccttacttatgtcggtttgacataaattctagtgataagtcttatagcttactgtatgctataacataggtgttcatttgttagtaatgtggtttaccaagcatattaaattgctgctgcatattgtgttcttttaaatgtatgacagtatcatgctaggcactaaaaataagatgcttcatttttggttgtcaaccttatttacagtccaatgcagtctgttattctaactggatttttgcagatgttatccaatatcacctgtaaaggaaaatggtaactaagcacaagtagcacactggaaattatgtgtttagggttattttgttttgttttgcctttttttttttaagtagttatctaaaaatacagaatctcgaagcagatgatcagaaatgagtcacaatttttgtatttatttagattttgtagcatgtccgatgtttttctttgtttgtagaccccagggatgacagtgtgtattttcagtataacagattttgttgacacatctaaaaaaaaaaaaaaaaagaaatcttaagaatatgtatatatgttttccttccttcatatttgtatttgagaggaaaagctaacagaaaacttcagcagtagtgcagggctcattccttgaaaggttggccaacacaaacgcaaagtaagttctgagtgtgatgctgtcattgactgccattggtgctgacttaatggttggagatctggagtgcgtaatgacaaatggagttactttggctattgcacatccagttgggagggttttctgtctcacactccttggatgtgttaaagaattc

SEQ ID NO: 6 - protein, 1830 aa, Gallus gallus
  MISC_FEATURE (1)..(1830): myosin VA (heavy chain 12, myosin) (MYO5A)
MAASELYTKYARVWIPDPEEVWKSAELLKDYKPGDKVLQLRLEEGKDLEYCLDPKTKELPPLRNPDILVGENDLTALSYLHEPAVLHNLKVRFIDSKLIYTYCGIVLVAINPYEQLPIYGEDIINAYSGQNMGDMDPHIFAVAEEAYKQMARDERNQSIIVSGESGAGKTVSAKYAMRYFATVSGSASEANVEEKVLASNPIMESIGNAKTTRNDNSSRFGKYIEIGFDKRYRIIGANMRTYLLEKSRVVFQAEEERNYHIFYQLCASAALPEFKTLRLGNANYFHYTKQGGSPVIDGIDDAKEMVNTRQACTLLGISDSYQMGIFRILAGILHLGNVEFASRDSDSCAIPPKHDPLTIFCDLMGVDYEEMAHWLCHRKLATATETYIKPISKLHAINARDALAKHIYANLFNWIVDHVNKALHSTVKQHSFIGVLDIYGFETFEINSFEQFCINYANEKLQQQFNMHVFKLEQEEYMKEQIPWTLIDFYDNQPCINLIEAKMGVLDLLDEECKMPKGSDDTWAQKLYNTHLNKCALFEKPRLSNKAFIIKHFADKVEYQCEGFLEKNKDTVYEEQIKVLKSSKKFKLLPELFQDEEKAISPTSATPSGRVPLSRTPVKPAKARPGQTSKEHKKTVGHQFRNSLHLLMETLNATTPHYVRCIKPNDFKFPFTFDEKRAVQQLRACGVLETIRISAAGFPSRWTYQEFFSRYRVLMKQKDVLSDRKQTCKNVLEKLILDKDKYQFGKTKIFFRAGQVAYLEKIRADKLRAACIRIQKTIRGWLMRKKYMRMRRAAITIQRYVRGHQARCYATFLRRTRAAIIIQKFQRMYVVRKRYQCMRDATIALQALLRGYLVRNKYQMMLREHKSIIIQKHVRGWLARVHYHRTLKAIVYLQCCYRRMMAKRELKKLKIEARSVERYKKLHIGLENKIMQLQRKIDEQNKEYKSLLEKMNNLEITYSTETEKLRSDVERLRMSEEEAKNATNRVLSLQEEIAKLRKELHQTQTEKKTIEEWADKYKHETEQLVSELKEQNTLLKTEKEELNRRIHDQAKEITETMEKKLVEETKQLELDLNDERLRYQNLLNEFSRLEERYDDLKDEMNLMVSIPKPGHKRTDSTHSSNESEYTFSSEITEAEDLPLRMEQEPSEKKAPLDMSLFLKLQKRVTELEQEKQSLQDELDRKEEQALRAKAKEEERPPIRGAELEYESLKRQELESENKKLKNELNELQKALTETRAPEVTAPGAPAYRVLLDQLTSVSEELEVRKEEVLILRSQLVSQKEAIQPKEDKNTMTDSTILLEDVQKMKDKGEIAQAYIGLKETNRLLESQLQSQKKSHENELESLRGEIQSLKEENNRQQQLLAQNLQLPPEARIEASLQHEITRLTNENLDLMEQLEKQDKTVRKLKKQLKVFAKKIGELEVGQMENISPGQIIDEPIRPVNIPRKEKDFQGMLEYKKEDEQKLVKNLILELKPRGVAVNLIPGLPAYILFMCVRHADYLNDDQKVRSLLTSTINGIKKVLKKRGDDFETVSFWLSNTCRFLHCLKQYSGEEGFMKHNTPRQNEHCLTNFDLAEYRQVLSDLAIQIYQQLVRVLENILQPMIVSGMLEHETIQGVSGVKPTGLRKRTSSIADEGTYTLDSIIRQLNSFHSVMCQHGMDPELIKQVVKQMFYIIGAVTLNNLLLRKDMCSWSKGMQIRYNVSQLEEWLRDKNLMNSGAKETLEPLIQAAQLLQVKKKTDEDAEAICSMCNALTTAQIVKVLNLYTPVNEFEERVLVSFIRTIQLRLRDRKDSPQLLMDAKHIFPVTFPFNPSSLALETIQIPASLGLGFISRV

SEQ ID NO: 7 - DNA, 6401 bp, Homo sapiens
  misc_feature (1)..(6401): myosin heavy chain 12
aatacaccccgggcaggtggagcgctcgcggctgctcgcggcgagcccgggagtgatggcgaggcccctgcgggcggccagcgcctgaggcgccccgccccgccccgccccgcgcggccctccccgcccggccctgccctgccctgctccctgccggcggctgcgggcgcttcctagtccgctcgggcggccgcccaggcgaggtgcggcctccgcacaggccggggggcgtaggcgcgcggggcccgccatggctgcgtcggagctctacacaaagtttgccagggtttggatacctgatccagaggaagtctggaagtcagcagagctgctcaaagattataagccaggagataaagtcctcctgcttcacctcgaggaaggaaaggatttggaataccatctagatccaaagaccaaggagctgcctcacttacgaaatcctgacatacttgttggtgaaaatgacctcacagccctcagctatcttcatgagcctgctgtgctccataatctcagagtccgctttattgattccaaacttatttatacgtattgtggtatagtcctagtagctataaatccctatgaacagctgcctatttatggagaagatattattaatgcatacagtggtcagaacatgggtgatatggatccacatatctttgcagtagctgaagaagcttacaagcaaatggccagagatgaacgaaatcagtccatcatcgtaagtggagagtctggggcaggaaaaacagtctcagctaagtatgccatgcgatactttgcaactgtgagtggttctgccagtgaggccaatgtggaggaaaaggtcttgacctccaaccccatcatggagtccattggaaatgctaaaacaaccaggaatgataatagcagccgttttgggaagtatattgagattggttttgataagagatatcgaatcattggtgccaatatgagaacttatcttttagagaaatccagagtggtattccaggcagaagaggagagaaactatcatatcttctatcagctttgtgcctcagcaaagttacctgaatttaaaatgctacgattaggaaatgcagataactttaattacacaaaacaaggaggcagtcctgtgattgaaggagtggatgatgcaaaggagatggcacatactaggcaggcctgcactttgctaggaattagtgaatctcatcaaatgggaattttccgaatacttgctggcatccttcacttaggcaatgttggatttacatcccgagatgcagacagctgcacaatacctcccaagcatgaacctctctgcatcttctgtgacctcatgggtgtggactatgaggagatgtgtcactggctctgccatcggaaactggctactgccacagagacatacatcaagcccatctccaagctgcaggccacgaatgcccgcgatgctttggccaaacacatctatgccaagctctttaactggattgtagataatgtcaatcaggctctccattctgctgtcaaacagcactcttttattggtgtgctagacatttacggatttgaaacatttgagataaatagttttgaacagttttgcataaattatgcaaatgaaaaactacagcaacaattcaatatgcatgtcttcaaattggagcaagaagaatatatgaaggaacaaattccatggacactcatagatttttatgataatcagccttgtattaatcttatagaatcaaaactaggcattctagatttactggatgaggaatgcaagatgcctaaaggcacagatgacacctgggcccaaaaattgtacaacacacatttgaacaaatgtgcactctttgaaaagcctcgtctatcaaacaaagctttcatcatccaacattttgctgacaaagtggaataccagtgtgaaggatttctcgaaaagaataaagacaccgtttttgaagaacaaattaaagttcttaaatcaagcaagtttaagatgctaccagaactatttcaagatgatgagaaggccatcagtccaacttcagccacctcctcagggcgcacacccctcacacgaactcctgcaaagcccaccaaaggcagaccaggccaaatggccaaagagcacaagaaaacagtggggcatcagttcagaaactccctgcacctgcttatggagacactcaatgccactacccctcactatgtgcgctgtatcaagcctaatgacttcaagctcccattcacgtttgatgagaagagggcagtgcagcagctgagagcatgtggtgtcctggaaaccatccgaatcagtgcggccggtttcccctcacggtggacttaccaagaatttttcagccgctaccgtgtcctaatgaagcagaaagatgtgctgagtgacagaaagcaaacatgcaagaatgtgttagagaaactgatactggacaaggacaaataccagtttggtaagacaaagatctttttccgtgccggtcaagtggcctatctagaaaaattgagagctgacaaactgagagctgcctgcatccggatccagaagaccatccgagggtggctgctgagaaagaagtacctacgcatgcggaaggcagccatcaccatgcagagatacgtgcggggctaccaggcccgatgctatgctaagtttctgcgcagaaccaaggcagcaaccatcattcaaaagtactggcgcatgtatgtggtccgcaggaggtacaagattagacgagctgccactattgttcttcagtcttacttgcgaggcttcttggccagaaataggtatcgcaagatactccgtgggcacaaagcagtcatcattcagaagcgagtccggggctggctggcccgcacacactacaagaggagcatgcatgccatcatctaccttcagtgctgcttcaggcggatgatggccaagcgtgagctaaagaagctcaaaatcgaggctcgctcagtggagcgctataagaagctgcgcatcggcatggagaacaagatcatgcagctgcagcgcaaagttgatgagcagaacaaagactacaaatgccttgtggagaaactaaccaatctggaaggaatatacaactctgagactgagaaactacgaagtgacttagaacgtcttcaactaagtgaagaggaagcgaaagttgccactgggcgggtccttagtctgcaggaggaaattgccaagctccggaaagacctggagcaaactcgttcagagaaaaaatgcattgaggaacatgcagatcgatacaaacaagaaacagagcagctggtatcaaatctgaaggaagaaaatactttgctgaagcaagaaaaagaagccctcaatcaccgcatcgtgcagcaggctaaggagatgacagaaactatggagaagaagttagtagaagaaacgaaacaactggaactcgaccttaatgatgaaaggctgagatatcagaaccttctgaatgagttcagtcgcctggaagaaagatatgatgacctcaaggaagagatgacccttatggtgcatgtgcctaagcctggacacaagagaacagactccacccacagcagcaacgagtctgaatatatctttagctctgaaattgcagaaatggaagacattccatcaaggacagaggaaccaagtgagaagaaggtacctctggacatgtcattgttccttaagctccagaagcgggtcacagagctggagcaggagaagcaggtgatgcaggatgagctggaccgcaaggaggagcaggtgctccgcagcaaggccaaggaagaagaaagaccacaaattagaggtgcagaactggaatatgagtcactcaagcgtcaagaactagaatcagaaaacaaaaaactgaagaatgagctaaatgagttgcgcaaggccctcagtgagaaaagtgccccagaggtgaccgccccaggtgcacctgcctaccgtgtcctcatggagcagctgacctctgtgagcgaggagcttgatgtccgcaaggaggaagtcctcatcttaaggtctcaactggtgagccagaaagaggccatccaacccaaggatgacaagaatacaatgacagattccacaatacttttggaagatgtacaaaaaatgaaagataaaggtgaaatagcacaagcatacattggtttgaaagaaacaaatagatcatctgctctggattaccatgagttgaatgaggatggagagctgtggctggtttatgaagggttaaaacaagccaataggctcctggaatcccagctgcagtcacagaagaggagccatgagaatgaggccgaggccctccgtggggagatccagagcctgaaggaggagaacaaccgacagcagcagctgctggcccagaacctgcagctgcccccagaggcccgcattgaggccagcctgcagcacgagatcacccggctgaccaacgaaaacttggatttgatggaacaacttgaaaaacaggataagacggtccgtaaactgaaaaaacaactgaaagtatttgccaaaaaaattggcgaactagaagtgggccagatggagaacatatccccaggacagatcattgatgaacccatccgaccagtcaacattcccaggaaagaaaaggatttccaagggatgctggaatacaagaaggaggatgagcaaaaacttgttaagaacctgattctggaactgaagccacgtggtgtagcagtcaatttgattccaggattaccggcatatatcctgttcatgtgtgttcgacatgctgactacctgaatgatgatcagaaagtaaggtcgttgctaacatcaacaattaacagcatcaaaaaagtattgaagaaaagaggtgatgattttgaaaccgtctccttctggctctctaacacatgccgatttttgcactgcttgaaacagtacagtggagaagagggctttatgaagcacaacacatctcgccagaatgaacactgcctcaccaattttgacctggctgagtatcggcaggtgctgagtgacttggccattcagatctaccagcagctcgtgcgggtgttagagaacatccttcagccaatgattgtctcaggcatgctggaacatgaaacgattcagggcgtgtctggggtgaagcccacagggttgagaaagcgaacctccagtatcgccgatgagggcacctacacactggactccatcctccggcagctcaactccttccactcggtcatgtgtcagcatggcatggaccctgaactgatcaagcaggtggtcaagcagatgttctacatcataggggccatcaccctgaacaaccttctcctgcggaaggacatgtgctcctggagtaaaggcatgcagatcaggtacaatgtcagtcaactggaagaatggctgcgtgacaagaatctgatgaatagtggggctaaagaaaccctggaacctctcattcaggctgctcaacttttgcaagtgaaaaagaaaacagatgatgatgcagaagccatttgttctatgtgcaatgctttaactactgcccagattgtgaaagtgttgaatttgtatactccagttaatgagtttgaagaaagagtctctgtgtcgttcattcgtactatacagatgcgtttacgagacaggaaagactctccccagctgctcatggatgctaaacacatctttcctgtcacctttcctttcaacccatcttccctcgcactagaaaccatccagattccagccagcctcggcctgggctttatttcacgggtctgaaagtgatgtccaggcaaaaattgacaatacatttcttgcccgaaataagaacccattatttccagtgagttactgaaaatacatttttaaagagaaagtactgattatctcccaaatgagaagtcattaactggaaatctccctagaatactttcatcactttggaaacaaagataggctctttcgtgctgtgttatctttatagcaacactcatccttaaccaactaggtaccgtgagtttacatacaggagaatgatggaaggaagggaggaaggaaaggaggagaaaaatgtgtcttcagctggcagcatttattttaaatccttagcactgagtttgaatggtataaaaagtataacttccatagatgagctgttgttaggaaggcaccaaagaacctcctctgcactaaacaggagaatggaaagaaaagtctccattgagtacatatcatgtcagtttagtaatcaattatgttgatattgttaaactggttcaaagaaataaactggcaatatgtaaagtaattcctcatttgtgtcactatgatatagagatattaaaggaatgttggtttgcta

SEQ ID NO: 8 - protein, 1855 aa, Homo sapiens
  MISC_FEATURE (1)..(1855): myosin heavy chain 12
MAASELYTKFARVWIPDPEEVWKSAELLKDYKPGDKVLLLHLEEGKDLEYHLDPKTKELPHLRNPDILVGENDLTALSYLHEPAVLHNLRVRFIDSKLIYTYCGIVLVAINPYEQLPIYGEDIINAYSGQNMGDMDPHIFAVAEEAYKQMARDERNQSIIVSGESGAGKTVSAKYAMRYFATVSGSASEANVEEKVLTSNPIMESIGNAKTTRNDNSSRFGKYIEIGFDKRYRIIGANMRTYLLEKSRVVFQAEEERNYHIFYQLCASAKLPEFKMLRLGNADNFNYTKQGGSPVIEGVDDAKEMAHTRQACTLLGISESHQMGIFRILAGILHLGNVGFTSRDADSCTIPPKHEPLCIFCDLMGVDYEEMCHWLCHRKLATATETYIKPISKLQATNARDALAKHIYAKLFNWIVDNVNQALHSAVKQHSFIGVLDIYGFETFEINSFEQFCINYANEKLQQQFNMHVFKLEQEEYMKEQIPWTLIDFYDNQPCINLIESKLGILDLLDEECKMPKGTDDTWAQKLYNTHLNKCALFEKPRLSNKAFIIQHFADKVEYQCEGFLEKNKDTVFEEQIKVLKSSKFKMLPELFQDDEKAISPTSATSSGRTPLTRTPAKPTKGRPGQMAKEHKKTVGHQFRNSLHLLMETLNATTPHYVRCIKPNDFKLPFTFDEKRAVQQLRACGVLETIRISAAGFPSRWTYQEFFSRYRVLMKQKDVLSDRKQTCKNVLEKLILDKDKYQFGKTKIFFRAGQVAYLEKLRADKLRAACIRIQKTIRGWLLRKKYLRMRKAAITMQRYVRGYQARCYAKFLRRTKAATIIQKYWRMYVVRRRYKIRRAATIVLQSYLRGFLARNRYRKILRGHKAVIIQKRVRGWLARTHYKRSMHAIIYLQCCFRRMMAKRELKKLKIEARSVERYKKLRIGMENKIMQLQRKVDEQNKDYKCLVEKLTNLEGIYNSETEKLRSDLERLQLSEEEAKVATGRVLSLQEEIAKLRKDLEQTRSEKKCIEEHADRYKQETEQLVSNLKEENTLLKQEKEALNHRIVQQAKEMTETMEKKLVEETKQLELDLNDERLRYQNLLNEFSRLEERYDDLKEEMTLMVHVPKPGHKRTDSTHSSNESEYIFSSEIAEMEDIPSRTEEPSEKKVPLDMSLFLKLQKRVTELEQEKQVMQDELDRKEEQVLRSKAKEEERPQIRGAELEYESLKRQELESENKKLKNELNELRKALSEKSAPEVTAPGAPAYRVLMEQLTSVSEELDVRKEEVLILRSQLVSQKEAIQPKDDKNTMTDSTILLEDVQKMKDKGEIAQAYIGLKETNRSSALDYHELNEDGELWLVYEGLKQANRLLESQLQSQKRSHENEAEALRGEIQSLKEENNRQQQLLAQNLQLPPEARIEASLQHEITRLTNENLDLMEQLEKQDKTVRKLKKQLKVFAKKIGELEVGQMENISPGQIIDEPIRPVNIPRKEKDFQGMLEYKKEDEQKLVKNLILELKPRGVAVNLIPGLPAYILFMCVRHADYLNDDQKVRSLLTSTINSIKKVLKKRGDDFETVSFWLSNTCRFLHCLKQYSGEEGFMKHNTSRQNEHCLTNFDLAEYRQVLSDLAIQIYQQLVRVLENILQPMIVSGMLEHETIQGVSGVKPTGLRKRTSSIADEGTYTLDSILRQLNSFHSVMCQHGMDPELIKQVVKQMFYIIGAITLNNLLLRKDMCSWSKGMQIRYNVSQLEEWLRDKNLMNSGAKETLEPLIQAAQLLQVKKKTDDDAEAICSMCNALTTAQIVKVLNLYTPVNEFEERVSVSFIRTIQMRLRDRKDSPQLLMDAKHIFPVTFPFNPSSLALETIQIPASLGLGFISRV

SEQ ID NO: 9 - DNA, 3549 bp, Homo sapiens
  misc_feature (1)..(3549): brush border myosin I (BBMI)
tcagggagcctgggctggaagaggcagcaaaagggaaaatcagaagagtggacactggcaagaggagggcagcctttttcccagcttccttgcaccatggacagctcccattaagccacctctccatcctggggccaggactcttatgccccattcctgtcaaattgagatttcatccaccattctccaaggacagtgaatttataccctagttccagtgttgggatcagtggcccctctggacatgcctctcctggaaggttctgtgggggtggaggatcttgtcctcctggaacccttggtggaggagtcactgctcaagaatcttcagcttcgctatgaaaacaaggagatttatacctacattgggaatgtggtgatctcagtgaatccctatcaacagcttcccatctatgggccagagttcattgccaaatatcaagactatactttctatgagctgaagccccatatctacgcattggcaaatgtggcgtaccagtcactgagggacagggaccgagaccagtgtatcctcatcacaggcgagagtggatcagggaagactgaggccagcaagctggtgatgtcttatgtggctgccgtctgtgggaaaggagagcaggtgaactctgtgaaggagcagctgctacagtctaacccagtgctggaggcttttggcaatgccaagaccattcgcaacaacaattcctcccgatttggaaaatacatggatattgaatttgacttcaagggatcccccctcggtggtgtcatcacaaactatctgcttgagaaatcccgattagtgaagcagctcaaaggagaaaggaacttccacatcttctatcagctgctggctggagcagatgaacagctgctgaaggccctgaagcttgagcgggatacaactggctatgcctatctgaatcatgaagtatccagagtggatggcatggacgacgcctccagcttcagggctgtacagagtgcaatggcagtgattgggttctcggaggaggagattcgacaagtgctagaggtgacatccatggtgctaaagctggggaacgtgttggtggctgatgagttccaggccagtgggataccagcaagtggcatccgtgatgggagaggtgttcgggagattggggagatggtgggcttgaattcagaagaagtagagagagctttgtgctcgaggaccatggaaacagccaaggaaaaggtggtcactgcactgaatgttatgcaggctcagtatgctcgggacgccctggctaagaacatctacagccgcctctttgactggatagtgaatcgaatcaatgagagcatcaaggtgggcatcggggaaaagaagaaggtaatgggagtccttgatatctacggttttgagatattagaggataatagctttgagcaatttgtgatcaactactgcaatgagaagctgcagcaggtgttcatagagatgaccctgaaagaagagcaagaggaatataagagagaaggcataccgtggacaaaggtggactactttgataatggcatcatttgtaagctcattgagcataatcagcgaggtatcctggccatgttggatgaggagtgcctgcggcctggggtggtcagtgactccactttcctagcaaagctgaaccagctcttctccaagcatggccactacgagagcaaagtcacccagaatgcccagcgtcagtatgaccacaccatgggcctcagctgcttccgcatctgccactatgcgggcaaggtgacatacaacgtgaccagctttattgacaagaataatgacctactcttccgagacctgttgcaggccatgtggaaggcccagcaccccctccttcggtccttgtttcctgagggcaatcctaagcaggcatctctcaaacgccccccgactgctggggcccagttcaagagttctgtggccatcctcatgaagaatctgtattccaagagccccaactacatcaggtgcataaagcccaatgagcatcagcagcgaggtcagttctcttcagacctggtggcaacccaggctcggtacctgggactgctggagaacgtacgggtgcgacgggcaggctatgcccaccgccagggttatgggcccttcctggaaaggtaccgattgctgagccggagcacctggcctcactggaatgggggagaccgggaaggtgttgagaaggtcctgggggagctgagcatgtcctcgggggagctggcctttggcaagacaaagatcttcattagaagccccaagactcttttctacctcgaagaacagaggcgcctgagactccagcagctggccacactcatacagaagatttaccgaggctggcgctgccgcacccactaccaactgatgcgaaagagtcagatcctcatctcctcttggtttcggggaaacatgcaaaagaaatgctatgggaagataaaggcatccgtgttattgatccaggcttttgtgagagggtggaaggcccgaaagaattatcgcaaatatttccggtcagaggctgccctcaccttggcagatttcatctacaagagcatggtacagaaattcctactggggctgaagaacaatttgccatccacaaacgtcttagacaagacatggccagccgccccctacaagtgcctcagcacagcaaatcaggagctgcagcagctcttctaccagtggaagtgcaagaggttccgggatcagctgtccccgaagcaggtagagatcctgagggaaaagctctgtgccagtgaactgttcaagggcaagaaggcttcatatccccagagtgtccccattccattctgtggtgactacattgggctgcaagggaaccccaagctgcagaagctgaaaggcggggaggaggggcctgttctgatggcagaggccgtgaagaaggtcaatcgtggcaatggcaagacttcttctcggattctcctcctgaccaagggccatgtgattctcacagacaccaagaagtcccaggccaaaattgtcattgggctagacaatgtggctggggtgtcagtcaccagcctcaaggatgggctctttagcttgcatctgagtgagatgtcatcggtgggctccaagggggacttcctgctggtcagcgagcatgtgattgaactgctgaccaaaatgtaccgggctgtgctggatgccacgcagaggcagcttacagtcaccgtgactgagaagttctcagtgaggttcaaggagaacagtgtggctgtcaaggtcgtccagggccctgcaggtggtgacaacagcaagctacgctacaaaaaaaaggggagtcattgcttggaggtgactgtgcagtgaggagggggcaccatgcagagatggcagttgcttcctcctgaaccagcactaatccccctctgccctcctgtgtgggaggatctctaacccctctgatcgtggcgcatggccttggggattaaactacccttgaagaggaaaaaaaaaaaaaaaaaaaaaaaaaaaaaaaaaaa

SEQ ID NO: 10 - protein, 1043 aa, Homo sapiens
  MISC_FEATURE (1)..(1043): brush border myosin I (BBMI)
MPLLEGSVGVEDLVLLEPLVEESLLKNLQLRYENKEIYTYIGNVVISVNPYQQLPIYGPEFIAKYQDYTFYELKPHIYALANVAYQSLRDRDRDQCILITGESGSGKTEASKLVMSYVAAVCGKGEQVNSVKEQLLQSNPVLEAFGNAKTIRNNNSSRFGKYMDIEFDFKGSPLGGVITNYLLEKSRLVKQLKGERNFHIFYQLLAGADEQLLKALKLERDTTGYAYLNHEVSRVDGMDDASSFRAVQSAMAVIGFSEEEIRQVLEVTSMVLKLGNVLVADEFQASGIPASGIRDGRGVREIGEMVGLNSEEVERALCSRTMETAKEKVVTALNVMQAQYARDALAKNIYSRLFDWIVNRINESIKVGIGEKKKVMGVLDIYGFEILEDNSFEQFVINYCNEKLQQVFIEMTLKEEQEEYKREGIPWTKVDYFDNGIICKLIEHNQRGILAMLDEECLRPGVVSDSTFLAKLNQLFSKHGHYESKVTQNAQRQYDHTMGLSCFRICHYAGKVTYNVTSFIDKNNDLLFRDLLQAMWKAQHPLLRSLFPEGNPKQASLKRPPTAGAQFKSSVAILMKNLYSKSPNYIRCIKPNEHQQRGQFSSDLVATQARYLGLLENVRVRRAGYAHRQGYGPFLERYRLLSRSTWPHWNGGDREGVEKVLGELSMSSGELAFGKTKIFIRSPKTLFYLEEQRRLRLQQLATLIQKIYRGWRCRTHYQLMRKSQILISSWFRGNMQKKCYGKIKASVLLIQAFVRGWKARKNYRKYFRSEAALTLADFIYKSMVQKFLLGLKNNLPSTNVLDKTWPAAPYKCLSTANQELQQLFYQWKCKRFRDQLSPKQVEILREKLCASELFKGKKASYPQSVPIPFCGDYIGLQGNPKLQKLKGGEEGPVLMAEAVKKVNRGNGKTSSRILLLTKGHVILTDTKKSQAKIVIGLDNVAGVSVTSLKDGLFSLHLSEMSSVGSKGDFLLVSEHVIELLTKMYRAVLDATQRQLTVTVTEKFSVRFKENSVAVKVVQGPAGGDNSKLRYKKKGSHCLEVTVQ

SEQ ID NO: 11 - DNA, 6786 bp, Homo sapiens
  misc_feature (1)..(6786): myosin heavy chain (MYH14)
ctctttctccccaggccgaagcctcgggacggccctggaagccgaccatggcagccgtgaccatgtcggtgcccgggcggaaggcgccccccaggccgggcccagtgcccgaggcggcccagccgttcctgttcacgccccgcgggcccagcgcgggtggcgggcctggctcgggcacctccccgcaggtggagtggacggcccggcgtctcgtgtgggtgccttcggagcttcacgggttcgaggcggcggcgctgcgggacgaaggcgaggaggaggcggaggtggagctggcggagagcgggaggcggctgcgactgccgcgggaccagatccagcgcatgaacccgcccaagttcagcaaggccgaggacatggccgagctgacctgcctcaacgaggcctcggtcctgcacaacctccgggagcggtactactccggcctcatctacacgtactccggccttttctgtgtggtcatcaacccgtacaagcagcttcccatctacacagaagccattgtggagatgtaccggggcaagaagcgccacgaggtgccaccccacgtgtacgcagtgaccgagggggcctatcggagcatgctgcaggatcgtgaggaccagtccattctctgcactggagagtctggagctgggaagacggaaaacaccaagaaggtcatccagtacctcgcccacgtggcatcgtctccaaagggcaggaaggagccgggtgtccccggtgagctggagcggcagctgcttcaggccaaccccatcctagaggcctttggcaatgccaagacagtgaagaatgacaactcctcccgattcggcaaattcatccgcatcaactttgatgttgccgggtacatcgtgggcgccaacattgagacctacctgctggagaagtcgcgggccatccgccaggccaaggacgagtgcagcttccacatcttctaccagctgctggggggcgctggagagcagctcaaagccgacctcctcctcgagccctgctcccactaccggttcctgaccaacgggccgtcatcctctcccggccaggagcgggaactcttccaggagacgctggagtcgctgcgggtcctgggattcagccacgaggaaatcatctccatgctgcggatggtctcagcagttctccagtttggcaacattgccttgaagagagaacggaacaccgatcaagccaccatgcctgacaacacagctgcacagaagctctgccgcctcttgggactgggggtgacggatttctcccgagccttgctcacccctcgcatcaaagttggccgagactatgtgcagaaagcccagactaaggaacaggctgacttcgcgctggaggccctggccaaggccacctacgagcgcctcttccgctggctggttctgcgcctcaaccgggccttggaccgcagcccccgccaaggcgcctccttcctgggcatcctggacatcgcgggctttgagatcttccagctgaactccttcgagcagctctgcatcaactacaccaacgagaagctgcagcagctcttcaaccacaccatgttcgtgctggagcaggaggagtaccagcgtgagggcatcccctggaccttcctcgactttggcctcgacctgcagccctgcatcgacctcatcgagcggccggccaacccccctggactcctggccctgctggatgaggagtgctggttcccgaaggccacagacaagtcgtttgtggagaaggtagcccaggagcagggcggccaccccaagttccagcggccgaggcacctgcgggatcaggccgacttcagtgttctccactacgcgggcaaggtcgactacaaggccaacgagtggctgatgaaaaacatggaccctctgaatgacaacgtcgcagccttgctccaccagagcacagaccggctgacggcagagatctggaaagacgtggagggcatcgtggggctggaacaggtgagcagcctgggcgacggcccaccaggtggccgcccccgtcggggtatgttccggacagtgggacagctctacaaggagtccctgagccgcctcatggccacactcagcaacaccaaccccagttttgtccggtgcattgtccccaaccacgagaagagggccgggaagctggagccacggctggtgctggaccagcttcgctgcaacggggtcctggagggcatccgcatctgtcgccagggcttccccaaccgcatcctcttccaggagttccggcagcgatacgagatcctgacacccaatgccatccccaagggcttcatggatgggaagcaggcctgtgaaaagatgatccaggcgctggaactggaccccaacctctaccgcgtgggacagagcaagatcttcttccgggctggggtcctggcccagctggaagaggagcgagacctgaaggtcaccgacatcatcgtctccttccaggcagctgcccggggatacctggctcgcagggccttccagaagcgccagcagcagcagagcgccctgagggtgatgcagcggaactgcgcggcctacctcaagctgagacactggcagtggtggcggctgtttaccaaggtgaagccactgctgcaggtgacgcggcaggatgaggtgctgcaggcacgggcccaggagctgcagaaagtgcaggagctacagcagcagagcgcccgcgaagttggggagctccagggccgagtggcacagctggaagaggagcgcgcccgcctggcagagcaattgcgagcagaggcagaactgtgtgcagaggccgaggagacgcgggggaggctggcagcccgcaagcaggagctggagctggtggtgtcagagctggaggctcgcgtgggcgaggaggaggagtgcagccgtcaaatgcaaaccgagaagaagaggctacagcagcacatacaggagctagaggcccaccttgaggctgaggagggtgcgcggcagaagctgcagctggagaaggtgacgacagaggcaaaaatgaagaaatttgaagaggacctgctgctcctggaagaccagaattccaagctgagcaagagcggaagctgctggaagatcgtctggccgagttctcatcccaggcagctgaggaggaggagaaggtcaagagcctcaataagctacggctcaaatatgaggccacaatcgcagacatggagggaccgcctacggaaggaggagaagggtcgccaggagctggagaagctgaagcggaggctggatggggagagctcagagctgcaggagcagatggtggagcagcaacagcgggcagaggagctgcgggcccagctgggccggaaggaggaggagctgcaggctgccctggccagggcagaagacgagggtggggcccgggcccagctgctgaaatccctgcgggaggctcaagcagccctggccgaggcccaggaggacctggagtctgagcgtgtggccaggaccaaggcggagaagcagcgccgggacctgggcgaggagctggaggcgctgcggggcgagctggaggacacgctggactccaccaacgcacagcaggagctccggtccaagagggaacaggaggtgacggagctgaagaagactctggaggaggagactcgcatccacgaggcggcagtgcaggagctgaggcagcgccacggccaggccctgggggagctggcggagcagctggagcaggcccggaggggcaaaggtgcatgggagaagacccggctggccctggaggccgaggtgtccgagctgcgggcagaactgagcagcctgcagactgcacgtcaggagggtgagcagcggaggcgccgcctggagttacagctgcaggaggtgcagggccgggctggtgatggggagagggcacgagcggaggctgctgagaagctgcagcgagcccaggctgaactggagaatgtgtctggggcgctgaacgaggctgagtccaaaaccatccgtcttagcaaggagctgagcagcacagaagcccagctgcacgatgcccaggagctgctgcaggaggagaccagggcgaaattggccttggggtcccgggtgcgagccatggaggctgaggcagccgggctgcgtgagcagctggaggaggaggcagctgccagggaacgggcgggccgtgaactgcagactgcccaggcccagctttccgagtggcggcggcgccaggaggaggaggcaggggcactggaggcaggggaggaggcacggcgccgggcagcccgggaggccgaggccctgacccagcgcctggcagaaaagacagagaccgtggatcggctggagcggggccgccgccggctgcagcaggagctggacgacgccaccatggacctggagcagcagcggcagcttgtgagcaccctggagaagaagcagcgcaagtttgaccagcttctggcagaggagaaggcagctgtacttcgggcagtggaggaacgtgagcgggccgaggcagagggccgggagcgtgaggctcgggccctgtcactgacacgggcactggaggaggagcaggaggcacgtgaggagctggagcggcagaaccgggccctgcgggctgagctggaggcactgctgagcagcaaggatgacgtcggcaagagcgtgcatgagctggaacgagcctgccgggtagcagaacaggcagccaatgatctgcgagcacaggtgacagaactggaggatgagctgacagcggccgaggatgccaagctgcgtctggaggtgactgtgcaggctctcaagactcagcatgagcgtgacctgcagggccgtgatgaggctggtgaagagaggcggaggcagctggccaagcagctgagagatgcagaggtggagcgggatgaggagcggaagcagcgcactctggccgtggctgcccgcaagaagctggagggagagctggaggagctgaaggctcagatggcctctgccggccagggcaaggaggaggcggtgaagcagcttcgcaagatgcaggcccagatgaaggagctatggcgggaggtggaggagacacgcacctcccgggaggagatcttctcccagaatcgggaaagtgaaaagcgcctcaagggcctggaggctgaggtgctgcggctgcaggaggaactggccgcctcggaccgtgctcggcggcaggcccagcaggaccgggatgagatggcagatgaggtggccaatggtaaccttagcaaggcagccattctggaggagaagcgtcagctggaggggcgcctggggcagttggaggaagagctggaggaggagcagagcaactcagagctgctcaatgaccgctaccgcaagctgctcctgcaggtagagtcactgaccacagagctgtcagctgagcgcagtttctcagccaaggcagagagcgggcggcagcagctggaacggcagatccaggagctacggggacgcctgggtgaggaggatgctggggcccgtgcccgccacaagatgaccattgctgcccttgagtctaagttggcccaggctgaggagcagctagagcaagagaccagagagcgcatcctctctggaaagctggtgcgcagagctgagaagcggcttaaagaggtggtgctccaggtggaggaggagcggagggtggctgaccagctccgggaccagctggagaagggaaaccttcgagtcaagcagctgaagcggcagctggaggaggccgaggaggaggcatcccgggctcaggctggccgccggaggctgcagcgtgagctggaagatgtcacagagtcggccgagtccatgaaccgtgaagtgaccacactgaggaaccggcttcgacgcggccccctcaccttcaccacccgcacggtgcgccaggtcttccgactagaggagggcgtggcatccgacgaggaggcagaggaagcacagcctgggtctgggccatccccggagcctgaggggtccccaccagcccacccccagtgaccctaccctgtccccagatgcactaacagatggggcccagcccccttcctccctggaccccacgggcccctgtcccaggaaccccgccctctgacttcttgccctttggaaatggtgcagcactctggcatttatcacccccacctgggtcccctgcaacctcccatcaaaggatgacccctaaacacagaggagcggggcaggcagggaggcaaggactggagctaccttgcttgttgggggactgggtacagttggcaagctgtgtttccatcagctccctgtcctcctttcttccctcgttattgatctatagacattaggaagggagtgagacggctcctccaccatcctcagccagtgcaacccattccctctgcttctctctctctctctctctctccctccctctccttccctaccctctcaccatctttcttggcctctctgagggtctctctgtgcatctttttaggaatctcgctctcactctctacgtagccactctccttcccccatttctgcgtccacccctgaactcctgagcgacagaagccccaggcctccaccagccttgaacccttgcaaaggggcaggacaaggggacccctctcactcctgctgctgcccatgctctgccctcccttctggttgctctgagggttcggagcttccctctgggactaaaggagtgtcctttaccctcccagcctccaggctctggcagaaataaactccaacccgactggac

SEQ ID NO: 12 - protein, 1995 aa, Homo sapiens
  MISC_FEATURE (1)..(1995): myosin heavy chain (MYH14)
MAAVTMSVPGRKAPPRPGPVPEAAQPFLFTPRGPSAGGGPGSGTSPQVEWTARRLVWVPSELHGFEAAALRDEGEEEAEVELAESGRRLRLPRDQIQRMNPPKFSKAEDMAELTCLNEASVLHNLRERYYSGLIYTYSGLFCVVINPYKQLPIYTEAIVEMYRGKKRHEVPPHVYAVTEGAYRSMLQDREDQSILCTGESGAGKTENTKKVIQYLAHVASSPKGRKEPGVPGELERQLLQANPILEAFGNAKTVKNDNSSRFGKFIRINFDVAGYIVGANIETYLLEKSRAIRQAKDECSFHIFYQLLGGAGEQLKADLLLEPCSHYRFLTNGPSSSPGQERELFQETLESLRVLGFSHEEIISMLRMVSAVLQFGNIALKRERNTDQATMPDNTAAQKLCRLLGLGVTDFSRALLTPRIKVGRDYVQKAQTKEQADFALEALAKATYERLFRWLVLRLNRALDRSPRQGASFLGILDIAGFEIFQLNSFEQLCINYTNEKLQQLFNHTMFVLEQEEYQREGIPWTFLDFGLDLQPCIDLIERPANPPGLLALLDEECWFPKATDKSFVEKVAQEQGGHPKFQRPRHLRDQADFSVLHYAGKVDYKANEWLMKNMDPLNDNVAALLHQSTDRLTAEIWKDVEGIVGLEQVSSLGDGPPGGRPRRGMFRTVGQLYKESLSRLMATLSNTNPSFVRCIVPNHEKRAGKLEPRLVLDQLRCNGVLEGIRICRQGFPNRILFQEFRQRYEILTPNAIPKGFMDGKQACEKMIQALELDPNLYRVGQSKIFFRAGVLAQLEEERDLKVTDIIVSFQAAARGYLARRAFQKRQQQQSALRVMQRNCAAYLKLRHWQWWRLFTKVKPLLQVTRQDEVLQARAQELQKVQELQQQSAREVGELQGRVAQLEEERARLAEQLRAEAELCAEAEETRGRLAARKQELELVVSELEARVGEEEECSRQMQTEKKRLQQHIQELEAHLEAEEGARQKLQLEKVTTEAKMKKFEEDLLLLEDQNSKLSKSGSCWKIVWPSSHPRQLRRRRRSRASISYGSNMRPQSQTWRDRLRKEEKGRQELEKLKRRLDGESSELQEQMVEQQQRAEELRAQLGRKEEELQAALARAEDEGGARAQLLKSLREAQAALAEAQEDLESERVARTKAEKQRRDLGEELEALRGELEDTLDSTNAQQELRSKREQEVTELKKTLEEETRIHEAAVQELRQRHGQALGELAEQLEQARRGKGAWEKTRLALEAEVSELRAELSSLQTARQEGEQRRRRLELQLQEVQGRAGDGERARAEAAEKLQRAQAELENVSGALNEAESKTIRLSKELSSTEAQLHDAQELLQEETRAKLALGSRVRAMEAEAAGLREQLEEEAAARERAGRELQTAQAQLSEWRRRQEEEAGALEAGEEARRRAAREAEALTQRLAEKTETVDRLERGRRRLQQELDDATMDLEQQRQLVSTLEKKQRKFDQLLAEEKAAVLRAVEERERAEAEGREREARALSLTRALEEEQEAREELERQNRALRAELEALLSSKDDVGKSVHELERACRVAEQAANDLRAQVTELEDELTAAEDAKLRLEVTVQALKTQHERDLQGRDEAGEERRRQLAKQLRDAEVERDEERKQRTLAVAARKKLEGELEELKAQMASAGQGKEEAVKQLRKMQAQMKELWREVEETRTSREEIFSQNRESEKRLKGLEAEVLRLQEELAASDRARRQAQQDRDEMADEVANGNLSKAAILEEKRQLEGRLGQLEEELEEEQSNSELLNDRYRKLLLQVESLTTELSAERSFSAKAESGRQQLERQIQELRGRLGEEDAGARARHKMTIAALESKLAQAEEQLEQETRERILSGKLVRRAEKRLKEVVLQVEEERRVADQLRDQLEKGNLRVKQLKRQLEEAEEEASRAQAGRRRLQRELEDVTESAESMNREVTTLRNRLRRGPLTFTTRTVRQVFRLEEGVASDEEAEEAQPGSGPSPEPEGSPPAHPQ

SEQ ID NO: 13 - DNA, 3624 bp, Homo sapiens
  misc_feature (1)..(3624): myosin IA (MYO1A)
cagggagcctgggctggaagaggcagcaaaagggaaaatcagaagagtggacactggcaagaggagggcagcctttttcccagcttccttgcaccatggacagctcccattaagccacctctccatcctggggccaggactcttatgccccattcctgtcaaattgagatttcatccaccattctccaaggacagtgaagttataccctagttccagtgttgggatcagtggcccctctggacatgcctctcctggaaggttctgtgggggtggaggatcttgtcctcctggaacccttggtggaggagtcactgctcaagaatcttcagcttcgctatgaaaacaaggagatttatacctacattgggaatgtggtgatctcagtgaatccctatcaacagcttcccatctatgggccagagttcattgccaaatatcaagactatactttctatgagctgaagccccatatctacgcattggcaaatgtggcgtaccagtcactgagggacagggaccgagaccagtgtatcctcatcacaggcgagagtggatcagggaagactgaggccagcaagctggtgatgtcttatgtggctgccgtctgtgggaaaggagagcaggtgaactctgtgaaggagcagctgctacagtctaacccagtgctggaggcttttggcaatgccaagaccattcgcaacaacaattcctcccgatttggaaaatacatggatattgaatttgacttcaagggatcccccctcggtggtgtcatcacaaactatctgcttgagaaatcccgattagtgaagcagctcaaaggagaaaggaacttccacatcttctatcagctgctggctggagcagatgaacagctgctgaaggccctgaagcttgagcgggatacaactggctatgcctatctgaatcatgaagtatccagagtggatggcatggacgacgcctccagcttcagggctgtacagagtgcaatggcagtgattgggttctcggaggaggagattcgacaagtgctagaggtgacatccatggtgctaaagctggggaacgtgttggtggctgatgagttccaggccagtgggataccagcaagtggcatccgtgatgggagaggtgttcgggagattggggagatggtgggcttgaattcagaagaagtagagagagctttgtgctcgaggaccatggaaacagccaaggaaaaggtggtcactgcactgaatgttatgcaggctcagtatgctcgggacgccctggctaagaacatctacagccgcctctttgactggatagtgaatcgaatcaatgagagcatcaaggtgggcatcggggaaaagaagaaggtaatgggagtccttgatatctacggttttgagatattagaggataatagctttgagcaatttgtgatcaactactgcaatgagaagctgcagcaggtgttcatagagatgaccctgaaagaagagcaagaggaatataagagagaaggcataccgtggacaaaggtggactactttgataatggcatcatttgtaagctcattgagcataatcagcgaggtatcctggccatgttggatgaggagtgcctgcggcctggggtggtcagtgactccactttcctagcaaagctgaaccagctcttctccaagcatggccactacgagagcaaagtcacccagaatgcccagcgtcagtatgaccacaccatgggcctcagctgcttccgcatctgccactatgcgggcaaggtgacatacaacgtgaccagctttattgacaagaataatgacctactcttccgagacctgttgcaggccatgtggaaggcccagcaccccctccttcggtccttgtttcctgagggcaatcctaagcaggcatctctcaaacgccccccgactgctggggcccagttcaagagttctgtggccatcctcatgaagaatctgtattccaagagccccaactacatcaggtgcataaagcccaatgagcatcagcagcgaggtcagttctcttcagacctggtggcaacccaggctcggtacctgggactgctggagaacgtacgggtgcgacgggcaggctatgcccaccgccagggttatgggcccttcctggaaaggtaccgattgctgagccggagcacctggcctcactggaatgggggagaccgggaaggtgttgagaaggtcctgggggagctgagcatgtcctcgggggagctggcctttggcaagacaaagatcttcattagaagccccaagactcttttctacctcgaagaacagaggcgcctgagactccagcagctggccacactcatacagaagatttaccgaggctggcgctgccgcacccactaccaactgatgcgaaagagtcagatcctcatctcctcttggtttcggggaaacatgcaaaagaaatgctatgggaagataaaggcatccgtgttattgatccaggcttttgtgagagggtggaaggcccgaaagaattatcgcaaatatttccggtcagaggctgccctcaccttggcagatttcatctacaagagcatggtacagaaattcctactggggctgaagaacaatttgccatccacaaacgtcttagacaagacatggccagccgccccctacaagtgcctcagcacagcaaatcaggagctgcagcagctcttctaccagtggaagtgcaagaggttccgggatcagctgtccccgaagcaggtagagatcctgagggaaaagctctgtgccagtgaactgttcaagggcaagaaggcttcatatccccagagtgtccccattccattctgtggtgactacattgggctgcaagggaaccccaagctgcagaagctgaaaggcggggaggaggggcctgttctgatggcagaggccgtgaagaaggtcaatcgtggcaatggcaagacttcttctcggattctcctcctgaccaagggccatgtgattctcacagacaccaagaagtcccaggccaaaattgtcattgggctagacaatgtggctggggtgtcagtcaccagcctcaaggatgggctctttagcttgcatctgagtgagatgtcatcggtgggctccaagggggacttcctgctggtcagcgagcatgtgattgaactgctgaccaaaatgtaccgggctgtgctggatgccacgcagaggcagcttacagtcaccgtgactgagaagttctcagtgaggttcaaggagaacagtgtggctgtcaaggtcgtccagggccctgcaggtggtgacaacagcaagctacgctacaaaaaaaaggggagtcattgcttggaggtgactgtgcagtgaggagggggcaccatgcagagatggcagttgcttcctcctgaaccagcactaatccccctctgccctcctgtgtgggaggatctctaacccctctgatcgtggcgcatggcttggggattaaactacccttgaagaggacccttgtcccaaacccttcttgttctctcctccaaaagtagcttcctccaacccgcagcctctctgcacactaataaaacatgtggcttggaaaggttcaaaaaaaaaaaa

SEQ ID NO: 14 - protein, 1043 aa, Homo sapiens; identical to SEQ ID NO: 10
  MISC_FEATURE (1)..(1043): myosin IA (MYO1A)

SEQ ID NO: 15 - DNA, 4825 bp, Homo sapiens
  misc_feature (1)..(4825): myosin IB (MYO1B)
gagcactccgcagctgggtgcgcacgggagcctcaaccgcggcgcgtggaggcagtaccagagcgcgcggcgcgcagtcggccggcagccgcgggacagccttggcagaacagccgcggcgggagccccgcagccccgggctgggcccgcgtcccggagcgccaccggagagcgaggacgacgtggaggcggagtggcgcccggcgaggtagcgccaggcgagctggagaccatggccaaaatggaggtgaaaacctcacttctggacaatatgattggagttggggatatggttcttttagaacctctcaatgaggagaccttcatcaacaacctcaagaagcgctttgaccacagtgaaatatacacatacattggaagtgtggttatatctgttaacccataccggtctttacccatttattcaccagagaaagtggaagaatacaggaacagaaatttttatgaactgagccctcacatctttgccctttcggatgaagcatacagatccctacgagatcaagataaggaccaatgtattctcattactggggaaagtggagcaggaaaaacagaggccagtaagcttgtcatgtcctatgtggcagctgtttgtggaaaaggagcagaagttaatcaagttaaagaacagcttttacagtccaacccggtcctggaagcttttggaaatgccaaaactgtaaggaatgacaactcctctagatttggcaaatatatggatattgaatttgactttaaaggcgatccactaggaggagtaataagtaactatcttttagagaaatctcgggttgttaaacagccaagaggtgaaagaaacttccatgtgttctatcagctgctctctggtgcctctgaagagctcctcaataaacttaagcttgagagggatttcagcaggtataactacctgagtctggattcggccaaagtgaatggagtggatgatgcagcaaattttagaaccgtgcggaatgccatgcagattgtgggctttatggatcatgaagctgagtctgtcttggcggtggtggcagcagtgttgaaactggggaacattgagttcaagcccgaatctcgagtgaatggtctagatgaaagcaaaatcaaagataaaaatgagttaaaagaaatttgtgaattgaccggcattgatcaatcagttctagaacgagcattcagtttccgaacagttgaggccaaacaggagaaagtttcaactacactgaatgtggctcaggcttattatgcccgtgatgctctggctaaaaacctctacagcaggttgttttcatggttggtaaatcgaatcaatgaaagcattaaggcacaaacaaaagtgagaaagaaggtcatgggtgttctggacatttatggctttgagattttcgaggacaacagctttgagcagttcattattaattattgtaacgaaaagctgcaacaaatcttcattgaacttactcttaaagaagagcaggaggagtatatacgggaggatatagaatggactcacattgactacttcaataatgctatcatttgtgacctaatagaaaataacacaaatggaatcctggccatgctggatgaagagtgcctcagacctggcacagtcactgatgagaccttcttagaaaagctgaaccaagtatgtgccacccaccagcattttgagagcaggatgagcaagtgctctcggttcctcaatgacacgtctctgcctcacagctgcttcaggatccagcattatgctggaaaggtgctgtaccaggtggaaggattcgttgacaaaaacaatgaccttctctatcgagacctgtcccaagccatgtggaaggccagccatgccctcatcaagtctttgttccccgaagggaatcccgccaagatcaacctgaaaaggcctcctacagcaggctcacagttcaaggcatccgtggccactctgatgaaaaacctacagaccaagaacccaaactatattaggtgtatcaaaccgaatgataaaaaagcagcacacatcttcaacgaggctctagtgtgtcatcagatcaggtacctggggcttttggagaacgtccgagtgcggagggcaggctacgccttcaggcaggcctatgaaccttgcctagaaagatacaaaatgctttgtaaacaaacatggcctcattggaaaggaccagccaggtctggtgtggaggtcctatttaatgaattagaaattcccgtggaagaatactcctttggtagatcaaagatattcatccgaaacccaagaacattattcaaattagaagacctgaggaagcaacgcctggaggacttggccactctcattcagaagatatatcgggggtggaaatgccgcacacacttcctgctaatgaaaaaaagccaaattgtgattgccgcctggtacaggagatatgcgcaacaaaagaggtaccagcagacaaagagttccgccttagtaattcagtcttatatccggggttggaaggctcgaaaaattctgcgggaactgaagcatcaaaagcgctgtaaggaagcagtcacgaccattgctgcatattggcatgggacccaggtacgtagagaatacaggaaattcttcagagccaatgctggaaagaaaatctatgagtttacgcttcagagaattgtgcaaaaatacttcttggaaatgaaaaataagatgccttccttatctccaatagacaagaattggccctcaagaccttacttattcttggattctactcacaaggagctaaaaaggattttccacttgtggaggtgtaaaaaatacagggaccaattcacagaccagcagaaacttatttatgaagagaaactagaagccagtgaactcttcaaagacaagaaggctttatacccatctagtgttgggcaaccattccaaggggcttacctggaaatcaacaagaaccccaagtataagaaactcaaagatgccattgaagaaaagatcatcattgctgaagtcgtgaacaaaattaaccgtgctaatgggaagagtacatctcggattttcctcttaacaaacaataatctccttcttgctgaccaaaagtctggacaaatcaagtcagaggttccattggtggatgtgaccaaggtatcaatgagctcacaaaatgatggcttcttcgccgtccacctcaaagagggctcagaagcagctagtaaaggagactttctcttcagcagtgatcacctgattgaaatggccaccaagctctatcgcacaactctcagccaaaccaaacagaagctcaatattgagatttccgatgagttcctggtacagttcagacaggacaaagtatgtgtgaagtttattcagggaaaccagaaaaatgggagtgtcccaacatgtaaacgaaaaaacaaccgtctccttgaagttgctgtcccttaactggcgcctcctctctactttcatggacttgttcctttgtaatagtgcaatttggttttgttttatttggggttcattgtatgtttgggaatcaccaaaggcttttagagttctttggcaaaataaaaatatttgactaatcaatttttattattggaatagttttaacctttcaaatacatgttctgtcctggagcaggattgtagaaactaacagtgtctattttcatgtctgatgtgttcttcctttagtcatcatgttaggtctgtgtaccctaaatcagcatattactcataaatcattaattaatataagcataggaaatggtcttaaaagatactgcattcattcatcagatatttattccatgcctactctatgctaggcactgtgctagatggtatgaaaacttattaggaacctttttgtttttgagaccattgcattctggctggtttgtgctggtttaacgacatctaagaaggtttagaaatggtgagaccaaaacaataactgttaatgatggacagcattattaggaaccctgtagtatgatatttaacaatataggcttcaagaagggctggtcctaagagggggcagaaatgaatgaccaggttaaatccctctacatgtggtttctgtttgaaaaaaagaaaactgacatttgaacaggacttttaatttgtttaaaactctggtaattacttgtaacagtagaaaatagaagtcattcttattttagaaaaagtgacagaagcagtccagtaagattatatgtttctgtttctggtaaataccatatatgatcctcgaaatgataatatctccagaatattgttttcacccaaatttgagtagatattttaaacacctaacaaagtaaagggctaaaagccattcagatagcagtaaaacattctgtatgatgtgcaataaaacatccaagatcttttttgaaagttttatttataatatacatttttgtatgagaaaggtgattggtacagggtgcctattttagtcatggatcaaaatttgtgtaacttgcagggctttctttctttttcttcaaatttacaagggttcattttggaaactacattttaaactttggaatcaaattgtttcttatttgggaggataatgtatatacattggtattatgttaaataataaaattgttctaatttggtgccatttcctgaatcacaactgtatttttgtatctcaagctattttcatatgttatgtgtcaatgtatcatctctcagaaaggttttacaatccaaacattatatgttctctgtgtaactgaatttcacttatcttttataaaccagaaacattaattg

SEQ ID NO: 16 - protein, 1078 aa, Homo sapiens
  MISC_FEATURE (1)..(1078): myosin IB (MYO1B)
MAKMEVKTSLLDNMIGVGDMVLLEPLNEETFINNLKKRFDHSEIYTYIGSVVISVNPYRSLPIYSPEKVEEYRNRNFYELSPHIFALSDEAYRSLRDQDKDQCILITGESGAGKTEASKLVMSYVAAVCGKGAEVNQVKEQLLQSNPVLEAFGNAKTVRNDNSSRFGKYMDIEFDFKGDPLGGVISNYLLEKSRVVKQPRGERNFHVFYQLLSGASEELLNKLKLERDFSRYNYLSLDSAKVNGVDDAANFRTVRNAMQIVGFMDHEAESVLAVVAAVLKLGNIEFKPESRVNGLDESKIKDKNELKEICELTGIDQSVLERAFSFRTVEAKQEKVSTTLNVAQAYYARDALAKNLYSRLFSWLVNRINESIKAQTKVRKKVMGVLDIYGFEIFEDNSFEQFIINYCNEKLQQIFIELTLKEEQEEYIREDIEWTHIDYFNNAIICDLIENNTNGILAMLDEECLRPGTVTDETFLEKLNQVCATHQHFESRMSKCSRFLNDTSLPHSCFRIQHYAGKVLYQVEGFVDKNNDLLYRDLSQAMWKASHALIKSLFPEGNPAKINLKRPPTAGSQFKASVATLMKNLQTKNPNYIRCIKPNDKKAAHIFNEALVCHQIRYLGLLENVRVRRAGYAFRQAYEPCLERYKMLCKQTWPHWKGPARSGVEVLFNELEIPVEEYSFGRSKIFIRNPRTLFKLEDLRKQRLEDLATLIQKIYRGWKCRTHFLLMKKSQIVIAAWYRRYAQQKRYQQTKSSALVIQSYIRGWKARKILRELKHQKRCKEAVTTIAAYWHGTQVRREYRKFFRANAGKKIYEFTLQRIVQKYFLEMKNKMPSLSPIDKNWPSRPYLFLDSTHKELKRIFHLWRCKKYRDQFTDQQKLIYEEKLEASELFKDKKALYPSSVGQPFQGAYLEINKNPKYKKLKDAIEEKIIIAEVVNKINRANGKSTSRIFLLTNNNLLLADQKSGQIKSEVPLVDVTKVSMSSQNDGFFAVHLKEGSEAASKGDFLFSSDHLIEMATKLYRTTLSQTKQKLNIEISDEFLVQFRQDKVCVKFIQGNQKNGSVPTCKRKNNRLLEVAVP

SEQ ID NO: 17 - DNA, 4973 bp, Homo sapiens
  misc_feature (1)..(4973): myosin IC (MYO1C)
gggccaagaggcctcccagtcagacctggacggctccagccgtgtcctgaggagctggaccagccacatcccctggggctgcagttgaagcagaaccaagtggccatcccggcgttagaccgtaggttcctggtcccggagtggtcggagcccgccagtgggcaggcagctcttgctcacaggccgcggtgcccaggccgctggctctccgcagggcggaatggcgctgcaagtggagctggtacccaccggggagatcatccgcgtggttcatccccacaggccctgcaagcttgccctgggcagtgacggggttcgggtgaccatggagagtgcgctcaccgcccgtgaccgggtgggggtgcaggatttcgtgctgctggagaacttcaccagcgaggccgccttcatcgagaacctgcggcggcgatttcgggagaatctcatctacacctacattggccccgtcctggtctctgtcaatccctaccgggacctgcagatctacagccggcagcatatggagcgttaccgtggcgtcagcttctatgaagtgccccctcacctgtttgccgtggcggacactgtgtaccgagcactgcgcacggagcgtcgggaccaggctgtgatgatctctggggagagcggggcaggcaagaccgaggccaccaagaggctgctgcagttctatgcagagacctgcccagcccccgagcgcggaggtgccgtgcgggaccggctgctacagagcaacccggtgctggaggcctttggaaatgccaagaccctccggaacgataactccagcaggttcgggaagtacatggatgtgcagtttgacttcaagggtgcccccgtgggtggccacatcctcagttacctcctggaaaagtcacgagtggtgcaccagaatcatggggagcggaacttccacatcttctaccagctgctggaggggggcgaggaggagactcttcgcaggctgggcttggaacggaacccccagagctacctgtacctggtgaagggccagtgtgccaaagtctcctccatcaacgacaagagtgactggaaggtcgtcaggaaggctctgacagtcattgatttcaccgaggatgaagtggaggacctgctgagcatcgtggccagcgtccttcatttgggcaacatccactttgctgccaacgaggagagcaatgcccaggtcaccaccgagaaccagctcaagtatctgaccaggctcctcagcgtggaaggctcgacgctgcgagaagccctgacacacaggaagatcatcgccaagggggaggagctcctgagcccgctgaacctggagcaggccgcgtacgcacgagacgccctcgccaaggctgtgtacagccgcacttttacctggctcgtcgggaagatcaacaggtcgctggcctccaaggacgtggagagccccagctggcggagcaccacggttctcgggctcctggatatttatggctttgaagtgtttcagcataacagctttgagcagttctgcatcaattactgcaacgagaagctgcagcagctcttcatcgagctcacgctcaagtcggagcaggaggagtacgaggcagagggcatcgcgtgggagcccgtccagtatttcaacaacaaaatcatctgtgatctggtggaggagaagtttaagggcatcatctcgattttggatgaggagtgtctgcgccccggggaggccacagacctgaccttcctggagaagctggaggatactgtcaagcaccatccacacttcctgacgcacaagctggctgaccagcggaccaggaaatctctgggccgaggggaattccgccttctgcactatgcgggggaggtgacctacagcgtgaccgggtttctggacaaaaacaatgaccttctcttccggaaccttaaggagaccatgtgtagctcaaagaatcccattatgagccagtgctttgaccggagcgagctcagtgacaagaagcggccagagacggtcgccacccagttcaagatgagcctcctgcagctggtggagatcctgcagtctaaggagcccgcctacgtccgctgcatcaaacccaatgatgccaaacagcccggccgctttgacgaggtgctgatccgccaccaggtgaagtacctggggctgttggaaaacctgcgcgtgcgcagagccggctttgcctatcgccgcaaatacgaagctttcctgcaaaggtacaagtcactgtgcccagagacgtggcccacgtgggcaggacggccgcaggatggggtggctgtgctggtccgacacctgggctacaagccagaagagtacaagatgggcaggaccaagatcttcatccgcttccccaagaccctgtttgccacagaggatgccctggaggtccggcggcagagcctggccacaaagatccaagctgcctggaggggctttcactggcggcagaaattcctccgggtgaagagatcagccatctgcatccagtcgtggtggcgtggaacactgggccggaggaaggcagccaagaggaagtgggcggcacagaccatccggcggctcatccgaggcttcgtcctgcgccacgccccccgctgccccgagaacgccttcttcctggaccatgtgcgcacctcttttttgctaaacctgaggcggcagctgccccagaatgtcctggacacctcgtggcccacgcccccacctgccctgcgtgaggcctcagagcttctgcgggagttgtgcataaagaacatggtgtggaaatactgccggagtatcagccctgagtggaagcagcagctgcagcagaaggccgtggctagtgagatcttcaagggcaagaaggataattaccctcagagtgtacccaggctcttcatcagcactcggcttggtacagatgagatcagcccccgagtgctgcaggccttgggctctgagcccattcagtatgcggtgcctgttgtgaaatacgaccgcaagggctacaagcctcgctcccggcagctgctgctcacgcccaacgccgtcgtcatcgtggaggacgccaaagtcaagcagaggattgattacgccaacctgaccggaatctctgtcagcagcctgagcgacagtctttttgtgcttcatgtacagcgtgcggacaataagcaaaagggagatgtggtgctgcagagtgaccacgtgattgagacgctgaccaagacagccctcagtgccaaccgcgtgaacagcatcaacatcaaccagggcagcatcacgtttgcagggggccccggcagggatggcaccattgacttcacacccggctcggagctgctcatcaccaaggccaagaacgggcacctggctgtggtcgccccacggctgaattctcggtgataaaggcgcccactggaccctcccaacgcccaatgctttgcttttctcctcctccccttcccagttaccaaagactcgaacttccagacagggacccagggacaccccgaagcccacctgcaatctcccacctcctgcccatccctctcttgagggagcagcaggggccaggagctaccccaggagtgggccaggccgggccacagcaataggaaagccagggccagagcgagccatgccagccctactgccgatgccaaatatttgagagaagggaacttttgctgaggttttctctgaggtttttttgatgctttataggaaactattttttaaaaaaagccatttcccacccaaggacacagtggatgtgttttccctgactccagcagggcaaggaatgtagccgagaggttgtgtgggctgggctctggtgccctcttccctggccaggacacctctcctcctgattcccttggcaccttgtctttctgtctgtttacctgtctccctgcctgcccatctgcatcttttgcagcccactctgacttccatctgggggctgagaccacccttgcctgcccccttctttctgccttaagaatgtccttttaggctgggcatggtggctcacgcctgtaaccccagcactttgggaggcggagacgggcagataacctgaggtcaggatttcgagaccaacctgacctacatggagaaactccgcctctagtaaaaatacaaaattagccgggcatggtggtgcacgcctctaatcccagctactcgggaggctgaggcaggagaatcacttgaacccgggaagtggaggttgcagtgagccaagagtacaccactgcactccagcctgggcaacagagcgagactccgtcttaaaaaaaaaaaaaaagaacgcccttttactgtcctcatcatcccagtttgaggcagtgctggagtggggaaggccgtcttagaccatagaggttggaagacgctgagagatcatccagcccagccccttgatgttacagagcagaagacagatgcccaaacaggagaaggcacttgcccacggtcatacggcaggttgccacaaaaccaagatggcagcccttcctcagcgtgcctcactgccactcccagagccagggagccccataaaacccacatcatgtcttaagagtatatctggctccttgaccagcaatcggccctgggagccaccaggtgggaaaagcgcctctgccagagtccaggccttgggatgacagacagcttgcccgcacactcgggccccactcaaggatgtagggccttttctggcccctgacccctccctggcatgggagcgtggggacggggctggccttgggaggagcggcaggggcatcacctccttctgctgcttctccctgctcctaccctcaagggcctgggggctgcccagctgcctctatgcccttctgggggtctcagcccactgctgacacttctgcaatccagagaaacactaaataaagcaatacgtgtttgccaaaaaaaaaaaaaaaaaaaaaaa

SEQ ID NO: 18 - protein, 1063 aa, Homo sapiens
  MISC_FEATURE (1)..(1063): myosin IC (MYO1C)
MALQVELVPTGEIIRVVHPHRPCKLALGSDGVRVTMESALTARDRVGVQDFVLLENFTSEAAFIENLRRRFRENLIYTYIGPVLVSVNPYRDLQIYSRQHMERYRGVSFYEVPPHLFAVADTVYRALRTERRDQAVMISGESGAGKTEATKRLLQFYAETCPAPERGGAVRDRLLQSNPVLEAFGNAKTLRNDNSSRFGKYMDVQFDFKGAPVGGHILSYLLEKSRVVHQNHGERNFHIFYQLLEGGEEETLRRLGLERNPQSYLYLVKGQCAKVSSINDKSDWKVVRKALTVIDFTEDEVEDLLSIVASVLHLGNIHFAANEESNAQVTTENQLKYLTRLLSVEGSTLREALTHRKIIAKGEELLSPLNLEQAAYARDALAKAVYSRTFTWLVGKINRSLASKDVESPSWRSTTVLGLLDIYGFEVFQHNSFEQFCINYCNEKLQQLFIELTLKSEQEEYEAEGIAWEPVQYFNNKIICDLVEEKFKGIISILDEECLRPGEATDLTFLEKLEDTVKHHPHFLTHKLADQRTRKSLGRGEFRLLHYAGEVTYSVTGFLDKNNDLLFRNLKETMCSSKNPIMSQCFDRSELSDKKRPETVATQFKMSLLQLVEILQSKEPAYVRCIKPNDAKQPGRFDEVLIRHQVKYLGLLENLRVRRAGFAYRRKYEAFLQRYKSLCPETWPTWAGRPQDGVAVLVRHLGYKPEEYKMGRTKIFIRFPKTLFATEDALEVRRQSLATKIQAAWRGFHWRQKFLRVKRSAICIQSWWRGTLGRRKAAKRKWAAQTIRRLIRGFVLRHAPRCPENAFFLDHVRTSFLLNLRRQLPQNVLDTSWPTPPPALREASELLRELCIKNMVWKYCRSISPEWKQQLQQKAVASEIFKGKKDNYPQSVPRLFISTRLGTDEISPRVLQALGSEPIQYAVPVVKYDRKGYKPRSRQLLLTPNAVVIVEDAKVKQRIDYANLTGISVSSLSDSLFVLHVQRADNKQKGDVVLQSDHVIETLTKTALSANRVNSININQGSITFAGGPGRDGTIDFTPGSELLITKAKNGHLAVVAPRLNSR

SEQ ID NO: 19 - DNA, 5182 bp, Homo sapiens
  misc_feature (1)..(5182): myosin ID (MYO1D)
cgcgctggcgccatggcggagcaggagagcctggaattcggcaaggcagacttcgtgctgatggacaccgtctccatgcccgagttcatggccaacctcaggctcagatttgaaaaagggcgcatctatacgttcattggagaagtcgtcgtttctgtgaacccttacaagttgttgaacatctatggaagagacacaattgagcagtataaaggccgtgagctgtatgagagaccgcctcacctttttgctattgcggatgctgcttacaaggctatgaagaggcgatcaaaagacacttgtattgtgatatcaggggaaagtggagctggtaaaacggaagccagtaagtacattatgcagtatattgcggccatcaccaaccccagtcagagagcagaggttgaaagagtgaagaatatgttgcttaagtccaactgtgttttggaagcttttggaaatgccaaaaccaaccgtaatgacaactcaagcaggtttggaaaatacatggatatcaactttgacttcaagggtgaccctattggtgggcatatcaataactacttactagaaaagtctcgagtgattgtgcaacagccaggagaaagaagctttcattctttctatcagctactccaaggaggttcagaacaaatgctacgctctctacatctccagaaatccctttcatcctacaactatattcatgtgggagctcaattaaagtcttctatcaatgatgctgccgaattcagagttgttgctgatgccatgaaagtcattggcttcaaacctgaggagatccaaacagtgtataagattttggctgctattctgcacttgggaaatttaaaatttgtagtagatggtgacacgcctcttattgagaatggcaaagtagtatctatcatagcagaattgctctctactaagacagatatggttgagaaagcccttctttaccggactgtggccacaggccgtgacatcattgacaagcagcacacagaacaagaggccagctacggcagagacgcctttgccaaggcaatatatgagcgccttttttgttggatcgttactcgcatcaatgatattattgaggtcaagaactatgacaccacaatccatgggaaaaacactgttattggtgtcttggatatctatggctttgaaatcttcgacaacaacagttttgaacaattctgtatcaattactgcaatgagaaactgcagcagctatttattcagctggttctgaagcaagaacaagaggaataccagcgggaagggatcccctggaaacatattgactacttcaacaatcagatcattgttgacctcgtggagcaacagcacaaagggatcattgcaatccttgatgatgcttgcatgaatgtcggcaaagtcaccgatgaaatgtttcttgaagcacttaacagtaaattgggcaaacacgcccatttttccagccgaaagctctgtgcctcagacaaaattctggagtttgatcgagattttcgaattcgacattatgcaggcgatgtagtctattctgtcattggttttattgacaaaaataaagatactttatttcaagatttcaagcgccttatgtataacagttcaaatcctgtgctcaagaatatgtggcctgaaggcaaactgagcattacagaggtgaccaagcgacctctgactgctgctaccttgtttaagaattctatgattgctctagtagacaaccttgcatcaaaggaaccatattacgttcgttgcatcaaacccaatgacaagaaatctccacagatatttgatgatgaacgctgccggcaccaagtagaatatcttggactactggaaaatgtgagagtgcgtcgggcaggatttgccttccgccagacatacgagaagtttcttcacaggtataagatgatctctgaattcacctggcccaaccatgaccttccttcagacaaagaggctgtcaagaaactaattgaacggtgtggttttcaggatgatgtagcttatgggaagaccaaaattttcattcgaacaccccgaacattgtttaccttggaagaactccgtgcccagatgctcataaggattgtcctctttctacaaaaggtgtggcggggcaccctggcccgcatgcggtacaaaagaaccaaggcagctctgacaataatcaggtactaccggcgctacaaagtgaagtcgtacatccacgaggtggccagacgcttccatggcgtcaagaccatgcgagactacgggaagcacgtgaagtggccaagccctcctaaagttcttcgccgttttgaggaggccctgcagacgattttcaatagatggagagcatcccagctcatcaagagcattccggcctcagacctgccccaggtcagggcaaaggttgcagccgtggaaatgttgaagggtcaaagggctgacctcgggctccagagggcctgggagggcaactatcttgcttcaaagccagatacacctcagacctcaggcacttttgtccctgttgctaatgaattgaaacggaaggacaaatacatgaatgtcctcttttcctgtcacgtccgtaaggtaaatcgatttagtaaggtggaagacagagcaatttttgtcactgaccgtcacctgtataaaatggatcccactaaacagtacaaggtgatgaagactatccctctatacaatttgactggtctgagtgtctccaatggaaaggaccaacttgtagtgttccatacgaaagacaacaaagacctcattgtctgcctcttcagcaaacagccaacccatgagagtcgaattggagaacttgttggagtgctggtgaatcatttcaagagtgagaagcgccaccttcaagtgaacgtcaccaacccagtacagtgcagcctgcacgggaagaagtgcaccgtctccgtggagacgcggctcaaccagccccagcccgacttcaccaagaatcgctcgggcttcatcctcagcgtgcccgggaactgacgccccgcggaggcctggcccggagcccggccacactccgagtcctgggtcccagtccagctgctgcctcccaacccatgcccgctagaaacctgctgcgagggcccctcccagaggagccccgcccctgtaagatttccttcctggttttctgcctttggtatcatcttcctctgtccttactgtccacggtccctgttcaataagccaaagaccctggtgccccgcccagacccctgggctgacgtccagaccaatctcaccccagaggcaactggatggtgcctttagttggtgcggatgccccgtggccaggtcaagtcagagcacctggacaggtgtcctccctgctgctgaccctgcagagggaaggggtggggatgcaggaccccgctctgcgggagccccatagccacctctcttgcccaaggtgagccagccctggggacccagctcagggaggctctgctcagagttcggcggacccaccccaacccaactcccagccgccagccaaagccactgggtgagcagagtcacccacagggccagcccctcagccaggagccagtggcaggagcggaacagcccatccagcagagtgagtccatccttcccaggttctcccctgggagactccctttgccaccaaggcccccaccagggcctctgaccaccgctctggagaggacagtgtggcatgctccaaggatcatcttacttaactcgcagcctgtggctgtggtcctcttatagatactttcaccgtttgcagggttgctaatcagatacctgctgtcaccacacttgggtcaggaaccctaatgagaacggggagctgccagggtgagggcagccctcagggtcggccgctttccctctggaccacctcccgctgcgtttcctactcagagaaacagcaagggcggggtcaagacacgggatgacgggaagcaggaagcggggcagcagcacagcgtggggtcctggcactgcaggccaggccaggatgcccaccccgccctctacacggccccttggggcctgcgcccgtgaaactggtgccagggagcactgccagcttgccagtttctgcccagcaaaagcacgtatgcttcaggggccttctgagaccaccttccccactgagccccagctgctgagaaggccttgagggaagtagaggctgggagcaaatgccccatgcggtgagaggatgaggggagcctacgcctcaggcatgtggtgagaggatgagggggagggagcccacgcctcaggtggagtgggcagaggtgcaagagagggatgtactgaagcttcttcccgtcctgccacagacacttctcctgccttcccaccctgacccggcagaacccaccaagtgcctgtgtgcagcctcctgtgcctcacccagggcctgaccccagagtggtcccaacaacccggtctcatgcccactccccatccctgcttcccaaaaattgcactgtgtgcagtttgcaacaaagaatcccgctggcatcctgtccttgggaaccctttctcattctccaagcctggtcagctgcctgcacaggcagaggtgccctcagcccaggttagcaacactcatagttttgccaattaccagtagacactagtggaaccatctaactggaacttcctctctccttccacttatttcctcaaacttgttgctttacactagacacatgcaaatgtatgttttaaacacaccaaaacagatcatgccaaatgagttgcctgtcaaaggctggagggcaggaggagggcctgggtttgggttctttcctcccagcctttggatggtgccttgggccccttagccccagcgccagggcctcccagctgaggccacaggacaagcacttttttatgatgtactaaaagccacagtatgtggcaactgcaaaaggatcaggaatttagggtatgatctcggtcacgtgtcccgggcgctgaggggaaaggaagcgggcatgattgtagacaatgagggggttctcttgatgtaatgaaatgcaattttatggtttggtgcaaaaactcctattttccagtaaattaactttatttctaaagcatattttgatttgccatcaagagcaataaagcattaaatctt

SEQ ID NO: 20 - protein, 1006 aa, Homo sapiens
  MISC_FEATURE (1)..(1006): myosin ID (MYO1D)
MAEQESLEFGKADFVLMDTVSMPEFMANLRLRFEKGRIYTFIGEVVVSVNPYKLLNIYGRDTIEQYKGRELYERPPHLFAIADAAYKAMKRRSKDTCIVISGESGAGKTEASKYIMQYIAAITNPSQRAEVERVKNMLLKSNCVLEAFGNAKTNRNDNSSRFGKYMDINFDFKGDPIGGHINNYLLEKSRVIVQQPGERSFHSFYQLLQGGSEQMLRSLHLQKSLSSYNYIHVGAQLKSSINDAAEFRVVADAMKVIGFKPEEIQTVYKILAAILHLGNLKFVVDGDTPLIENGKVVSIIAELLSTKTDMVEKALLYRTVATGRDIIDKQHTEQEASYGRDAFAKAIYERLFCWIVTRINDIIEVKNYDTTIHGKNTVIGVLDIYGFEIFDNNSFEQFCINYCNEKLQQLFIQLVLKQEQEEYQREGIPWKHIDYFNNQIIVDLVEQQHKGIIAILDDACMNVGKVTDEMFLEALNSKLGKHAHFSSRKLCASDKILEFDRDFRIRHYAGDVVYSVIGFIDKNKDTLFQDFKRLMYNSSNPVLKNMWPEGKLSITEVTKRPLTAATLFKNSMIALVDNLASKEPYYVRCIKPNDKKSPQIFDDERCRHQVEYLGLLENVRVRRAGFAFRQTYEKFLHRYKMISEFTWPNHDLPSDKEAVKKLIERCGFQDDVAYGKTKIFIRTPRTLFTLEELRAQMLIRIVLFLQKVWRGTLARMRYKRTKAALTIIRYYRRYKVKSYIHEVARRFHGVKTMRDYGKHVKWPSPPKVLRRFEEALQTIFNRWRASQLIKSIPASDLPQVRAKVAAVEMLKGQRADLGLQRAWEGNYLASKPDTPQTSGTFVPVANELKRKDKYMNVLFSCHVRKVNRFSKVEDRAIFVTDRHLYKMDPTKQYKVMKTIPLYNLTGLSVSNGKDQLVVFHTKDNKDLIVCLFSKQPTHESRIGELVGVLVNHFKSEKRHLQVNVTNPVQCSLHGKKCTVSVETRLNQPQPDFTKNRSGFILSVPGN

SEQ ID NO: 21 - DNA, 4729 bp, Homo sapiens
  misc_feature (1)..(4729): myosin IE (MYO1E)
cgagactcagccagaggagtacggattaagtggccgaagaaagaggagtgaggcaggggagcgaggcggacgctccgagcgcatcggactcacctgggccggcggcgagcggcgagtacgagtggactcttgccctccgcagcatgcgccccgcctgctaagtcgccgccgtctcgccctcacctagcaccgccaatcccgcctggatggagtcccctctgggttcccattggctcctgtgagtgcttgggtgtcgggagcctgtttttggcgaggggaaccaacttttgaagttcgcccagaagactgcgttccagccccagttccccggcagcgggacccggcgaagacgcgaccgcggcgcgagtcaccatgggaagcaaaggtgtctaccagtaccactggcaaagccacaatgtcaagcacagtggtgtggacgacatggtgctactgtccaagatcacagagaactccatcgtggagaatctgaagaagagatacatggatgactacatttttacatatataggatctgtattaatctcagtcaaccctttcaagcagatgccatattttggggaaaaggaaattgaaatgtaccaaggagcggcacagtatgaaaacccaccacatatctatgcccttgcagataatatgtacagaaacatgatcattgacagagagaaccagtgcgtcattatcagtggtgaaagtggtgctggaaaaacagtggctgccaaatatatcatgagctacatctccagagtgtctggaggagggaccaaagtccagcacgtgaaggacattatcctgcagtccaacccgctgctggaggccttcgggaacgccaagaccgtccggaacaacaactccagccgatttggaaaatactttgaaatccagttcagtccaggtggggaaccagatggtggaaagatctccaacttccttctggaaaaatctagggtggtgatgaggaacccaggagagcggagttttcacatattttaccagctcatcgagggcgcctctgcagagcagaaacacagccttggcatcaccagcatggactattattactacctgagcctctcgggctcatacaaggttgatgacattgacgacaggcgggagtttcaggaaactctgcacgccatgaatgtgattgggatctttgcagaagagcaaacgctggtgttgcagatagtggcgggtattctccacctgggaaacatcagcttcaaagaagttggcaactacgcggctgtggagagtgaagagtttttagcttttcctgcatatctgctagggataaaccaggaccggttgaaagaaaagctaacaagccggcagatggatagcaagtggggaggcaaatccgaatccatccacgtgaccctcaacgtagagcaggcctgttacacccgggatgcgctcgccaaggccctgcacgcccgggtctttgatttcttggtagattccatcaataaagccatggagaaagaccatgaagaatacaacattggcgtcctagacatctatggctttgaaatattccagaaaaatggctttgaacagttttgtatcaattttgttaatgaaaaactgcagcagatttttattgaactgacattaaaggcagaacaggaagaatatgttcaagagggaataagatggacacccattgagtactttaataataaaatcgtatgtgacctcatagagaacaaagtgaaccctcctggcatcatgagcatcctggatgacgtgtgcgccacgatgcatgcggtgggtgagggggcagatcagacgctgctccagaaacttcagatgcagattgggagtcatgagcacttcaacagttggaaccaaggcttcatcattcatcattatgctgggaaggtatcctatgacatggatggcttttgtgaaaggaaccgggatgtgctttttatggatctcatcgagcttatgcagagcagcgagctgcctttcataaagtctttatttccggaaaatctgcaggctgacaagaaagggcgcccaactactgccggaagcaaaataaagaaacaagccaatgaccttgtgagcaccctgatgaaatgtacgccccactacattcgctgcatcaagccaaacgaaaccaagaagcccagagactgggaggaaagcagggtaaagcatcaagtcgaatatttgggtctgaaagagaacattcgagtgagaagagctggctatgcctatcggcgcatcttccaaaaattcctacagaggtatgccattctgaccaaagccacctggccttcttggcagggagaggagaagcaaggcgtcctgcacctgctgcagtcggtcaacatggacagcgaccagttccagctggggaggagtaaagtgttcatcaaagcccccgagtctctatttcttttagaagagatgagagagagaaagtatgatgggtatgctcgagtgatacagaaatcatggaggaaattcgtggcccggaagaaatacgttcaaatgagagaagaagcctcagacctcttattgaacaagaaggagagaaggagaaacagtattaacaggaactttataggggattatattgggatggaagagcacccagaactccagcagttcgtgggcaagagggagaagattgatttcgcagacacagtcaccaagtatgacaggaggttcaagggtgtaaagcgagacctgctccttaccccaaagtgcttgtacttaatcggacgagaaaaagtcaaacagggcccagacaagggcctggtgaaagaagtcctgaagcggaaaatcgagatagaacggatcttgtctgtgtccctcagtactatgcaggatgacatttttattctccatgagcaagagtatgacagtttgcttgaatctgtcttcaaaactgaattcctaagcctcttagcaaagcgttacgaggagaagacccagaagcaactacctctgaaattcagcaatacgcttgaactgaagttgaaaaaggaaaactggggcccctggagtgcagggggctcccggcaagtgcagttccaccaagggtttggggacctggctgtcctcaagcccagtaacaaagtgctgcaggtcagcatcggacctggactgcccaagaactcccgtcctaccagaaggaacactacccaaaatacaggttattccagtgggactcaaaatgccaactacccagtgagagctgcccctcctcccccaggataccatcagaacggagtcatcagaaaccagtatgtgccatatccccatgctcctggaagccagaggtccaatcagaaaagcctgtacacctccatggcccgcccgcccttgcctcggcagcagtctaccagttcagaccgagtgtcacagacgccagagagcctggatttcctcaaggtcccggaccagggagctgcaggggtcaggagacaaacaaccagtcggcctcccccagcagggggcagacccaagccccagcccaagcccaagcctcaggtgccacagtgcaaggctttgtatgcctatgacgctcaggacacagacgaactcagctttaatgccaatgacattattgatattatcaaagaagatccttctggctggtggacgggtcgactacgaggcaagcagggcctgttccccaacaactatgtgaccaagatctgaggtgcccgtgactctgacacatggggcagaggagctccaggcacagaccaggggaggggatatttaggggctccccttacaatccacaatgagcaattgcttctccaaggcctggagctattctggtaccttccccatggaggacactgaaaaggctgggttggggacagggagtatcactccataagtgatcctaaaaggtagcctcttcataggaacccaggaggacaaaaccaccatgcattaagatttatttattgtatttaaacctggtgagaggacaagtgaggtctgctcagaccttgtaggcttctatcaaaacagcaccctgcttgctcaccaggcctagagaatggctgtaggtggccgctgacaagtgcctttagttgaagagcacatttctttcatctctcttgtccatacctgatagacacattcctctctgccaccttccttcagggaggacccgccctctgcagactgggcttagcgtgagcaggcacttcccatgtacgtgccaagggtaagctggcctgctgagcccagggcgacagaggggcactggtttacactttgccgggaccatcagggccgccaagcaggtcaggggctgggggctgggggctgggctgctggctttgctttctctgggtcttcaattagaatgtggctggcccatattggtttgtgtttaaatgctgtacttactacaagaaggatcttttttcaagctgtacatttataaaaacagatcatatactgtatatataaaaatcttgagatggtagaaacatgtatgaatgtactaagtagtattccactgtactcattcataaggtaggttttcttacaaaactcacaccaggtacttaaagatgtgctctgcttttttccaactacggagtgtcactgctttctaggtcagtccctgcagactcttctcaactctttccctataggaaacttactccgcgtcctgcccccacctcctaaataaataaaggaatcggcgaacaaaaaaaaaaaaaaa

SEQ ID NO: 22 - protein, 1108 aa, Homo sapiens
  MISC_FEATURE (1)..(1108): myosin IE (MYO1E)
MGSKGVYQYHWQSHNVKHSGVDDMVLLSKITENSIVENLKKRYMDDYIFTYIGSVLISVNPFKQMPYFGEKEIEMYQGAAQYENPPHIYALADNMYRNMIIDRENQCVIISGESGAGKTVAAKYIMSYISRVSGGGTKVQHVKDIILQSNPLLEAFGNAKTVRNNNSSRFGKYFEIQFSPGGEPDGGKISNFLLEKSRVVMRNPGERSFHIFYQLIEGASAEQKHSLGITSMDYYYYLSLSGSYKVDDIDDRREFQETLHAMNVIGIFAEEQTLVLQIVAGILHLGNISFKEVGNYAAVESEEFLAFPAYLLGINQDRLKEKLTSRQMDSKWGGKSESIHVTLNVEQACYTRDALAKALHARVFDFLVDSINKAMEKDHEEYNIGVLDIYGFEIFQKNGFEQFCINFVNEKLQQIFIELTLKAEQEEYVQEGIRWTPIEYFNNKIVCDLIENKVNPPGIMSILDDVCATMHAVGEGADQTLLQKLQMQIGSHEHFNSWNQGFIIHHYAGKVSYDMDGFCERNRDVLFMDLIELMQSSELPFIKSLFPENLQADKKGRPTTAGSKIKKQANDLVSTLMKCTPHYIRCIKPNETKKPRDWEESRVKHQVEYLGLKENIRVRRAGYAYRRIFQKFLQRYAILTKATWPSWQGEEKQGVLHLLQSVNMDSDQFQLGRSKVFIKAPESLFLLEEMRERKYDGYARVIQKSWRKFVARKKYVQMREEASDLLLNKKERRRNSINRNFIGDYIGMEEHPELQQFVGKREKIDFADTVTKYDRRFKGVKRDLLLTPKCLYLIGREKVKQGPDKGLVKEVLKRKIEIERILSVSLSTMQDDIFILHEQEYDSLLESVFKTEFLSLLAKRYEEKTQKQLPLKFSNTLELKLKKENWGPWSAGGSRQVQFHQGFGDLAVLKPSNKVLQVSIGPGLPKNSRPTRRNTTQNTGYSSGTQNANYPVRAAPPPPGYHQNGVIRNQYVPYPHAPGSQRSNQKSLYTSMARPPLPRQQSTSSDRVSQTPESLDFLKVPDQGAAGVRRQTTSRPPPAGGRPKPQPKPKPQVPQCKALYAYDAQDTDELSFNANDIIDIIKEDPSGWWTGRLRGKQGLFPNNYVTKI

SEQ ID NO: 23 - DNA, 3860 bp, Homo sapiens
  misc_feature (1)..(3860): myosin IF (MYO1F)
gtgaacgggcagaagcagggccatgcccaagccacccccaagatccccctgaacctgcacctccatcacgacccattcaggagcctccaggagcccagacaccagccccccaccatgggcagcaaggagcgcttccactggcagagccacaacgtgaagcagagcggcgtggatgacatggtgcttcttccccagatcaccgaagacgccattgccgccaacctccggaagcgcttcatggacgactacatcttcacctacatcggctctgtgctcatctctgtaaaccccttcaagcagatgccctacttcaccgaccgtgagatcgacctctatcagggcgcggcccagtatgagaatcccccgcacatctacgccctcacggacaacatgtaccggaacatgcttatcgactgtgagaaccagtgtgtcatcattagtggagagagtggagctgggaagacagtggcagccaaatatatcatgggctacatctccaaggtgtctggcggaggcgagaaggtccagcacgtcaaagatatcatcctgcagtccaacccgctgctcgaggccttcggcaacgccaagactgtgcgcaacaacaattccagccgctttggcaagtactttgagatccagttcagccgaggtggggagccagatgggggcaagatctccaacttcttgctggagaagtcccgcgtggtcatgcaaaatgaaaatgagaggaacttccacatctactaccagctgctggaaggggcctcccaggagcaaaggcagaacctgggcctcatgacaccggactactattactacctcaaccaatcggacacctaccaggtggacggcacggacgacagaagcgactttggtgagactctgagtgctatgcaggttattgggatcccgcccagcatccagcagctggtcctgcagctcgtggcggggatcttgcacctggggaacatcagtttctgtgaagacgggaattacgcccgagtggagagtgtggacctcctggcctttcccgcctacctgctgggcattgacagcgggcgactgcaggagaagctgaccagccgcaagatggacagccgctggggcgggcgcagcgagtccatcaatgtgaccctcaacgtggagcaggcagcctacacccgtgatgccctggccaaggggctctatgcccgcctcttcgacttcctcgtggaggccatcaaccgtgctatgcagaaaccccaggaagagtacagcatcggtgtgctggacatttacggcttcgagatcttccagaaaaatggcttcgagcagttttgcatcaacttcgtcaatgagaagctgcagcaaatctttatcgaacttaccctgaaggccgagcaggaggagtatgtgcaggaaggcatccgctggactccaatccagtacttcaacaacaaggtcgtctgtgacctcatcgaaaacaagctgagccccccaggcatcatgagcgtcttggacgacgtgtgcgccaccatgcacgccacgggcgggggagcagaccagacactgctgcagaagctgcaggcggctgtggggacccacgagcatttcaacagctggagcgccggcttcgtcatccaccactacgctggcaaggtctcctacgacgtcagcggcttctgcgagaggaaccgagacgttctcttctccgacctcatagagctgatgcagaccagtgagcaggccttcctccggatgctcttccccgagaagctggatggagacaagaaggggcgccccagcaccgccggctccaagatcaagaaacaagccaacgacctggtggccacactgatgaggtgcacaccccactacatccgctgcatcaaacccaacgagaccaagaggccccgagactgggaggagaacagagtcaagcaccaggtggaatacctgggcctgaaggagaacatcagggtgcgcagagccggcttcgcctaccgccgccagttcgccaaattcctgcagaggtatgccattctgacccccgagacgtggccgcggtggcgtggggacgaacgccagggcgtccagcacctgcttcgggcggtcaacatggagcccgaccagtaccagatggggagcaccaaggtctttgtcaagaacccagagtcgcttttcctcctggaggaggtgcgagagcgaaagttcgatggctttgcccgaaccatccagaaggcctggcggcgccacgtggctgtccggaagtacgaggagatgcgggaggaagcttccaacatcctgctgaacaagaaggagcggaggcgcaacagcatcaatcggaacttcgtcggggactacctggggctggaggagcggcccgagctgcgtcagttcctgggcaagagggagcgggtggacttcgccgattcggtcaccaagtacgaccgccgcttcaagcccatcaagcgggacttgatcctgacgcccaagtgtgtgtatgtgattgggcgagagaaagtgaagaagggacctgagaagggccaggtgtgtgaagtcttgaagaagaaagtggacatccaggctctgcggggagtctccctcagcacgcgacaggacgacttcttcatcctccaagaggatgccgccgacagcttcctggagagcgtcttcaagaccgagtttgtcagccttctgtgcaagcgcttcgaggaggcgacgcggaggcccctgcccctcaccttcagcgacacactacagtttcgggtgaagaaggagggctggggcggtggcggcacccgcagcgtcaccttctcccgcggcttcggcgacttggcagtgctcaaggttggcggtcggaccctcacggtcagcgtgggcgatgggctgcccaagagctccaagcctacgcggaagggaatggccaagggaaaacctcggaggtcgtcccaagcccctacccgggcggcccctgcgccccccagaggcatggatcgcaatggggtgcccccctctgccagagggggccccctgcccctggagatcatgtctggagggggcacccacaggcctccccggggccctccgtccacatccctgggagccagcagacgaccccgggcacgtccgccctcagagcacaacacagaattcctcaacgtgcctgaccagggcatggccggcatgcagaggaagcgcagcgtggggcaacggccagtgcctggtgtgggccgacccaagccccagcctcggacacatggtcccaggtgccgggccctataccagtacgtgggccaagatgtggacgagctgagcttcaacgtgaacgaggtcattgagatcctcatggaagatccctcgggctggtggaagggccggcttcacggccaggagggccttttcccaggaaactacgtggagaagatctgagctgggccctgggatactgccttctctttcgcccgcctatctgcctgccggcctggtggggagccaggccctgccaatgagagcctcgtttacctgggctgcaatagcctaaaagtccagtcctttggcctccagtcctgcccaggccctgggtcaccaggtcactgctgcagcccccgcccctgggccctggtcttcctccaacatcacacctgctgcccattctccatttctgtgtgtgtcaaaggggactaacagcagaatctacctcccaactgccatgtgattaagaaatgggtcttgagtcctgtgctgttggcaaagtgccaggcacagttggggaggggggggtccttaacaagcgtgactttgctcattctgtcatcactaaggcaataaacctttgccaggtgaaaaaaaaaaaaaaaaaaaaaaaaaaaaaaaaaaaa

SEQ ID NO: 24 - protein, 1098 aa, Homo sapiens
  MISC_FEATURE (1)..(1098): myosin IF (MYO1F)
MGSKERFHWQSHNVKQSGVDDMVLLPQITEDAIAANLRKRFMDDYIFTYIGSVLISVNPFKQMPYFTDREIDLYQGAAQYENPPHIYALTDNMYRNMLIDCENQCVIISGESGAGKTVAAKYIMGYISKVSGGGEKVQHVKDIILQSNPLLEAFGNAKTVRNNNSSRFGKYFEIQFSRGGEPDGGKISNFLLEKSRVVMQNENERNFHIYYQLLEGASQEQRQNLGLMTPDYYYYLNQSDTYQVDGTDDRSDFGETLSAMQVIGIPPSIQQLVLQLVAGILHLGNISFCEDGNYARVESVDLLAFPAYLLGIDSGRLQEKLTSRKMDSRWGGRSESINVTLNVEQAAYTRDALAKGLYARLFDFLVEAINRAMQKPQEEYSIGVLDIYGFEIFQKNGFEQFCINFVNEKLQQIFIELTLKAEQEEYVQEGIRWTPIQYFNNKVVCDLIENKLSPPGIMSVLDDVCATMHATGGGADQTLLQKLQAAVGTHEHFNSWSAGFVIHHYAGKVSYDVSGFCERNRDVLFSDLIELMQTSEQAFLRMLFPEKLDGDKKGRPSTAGSKIKKQANDLVATLMRCTPHYIRCIKPNETKRPRDWEENRVKHQVEYLGLKENIRVRRAGFAYRRQFAKFLQRYAILTPETWPRWRGDERQGVQHLLRAVNMEPDQYQMGSTKVFVKNPESLFLLEEVRERKFDGFARTIQKAWRRHVAVRKYEEMREEASNILLNKKERRRNSINRNFVGDYLGLEERPELRQFLGKRERVDFADSVTKYDRRFKPIKRDLILTPKCVYVIGREKVKKGPEKGQVCEVLKKKVDIQALRGVSLSTRQDDFFILQEDAADSFLESVFKTEFVSLLCKRFEEATRRPLPLTFSDTLQFRVKKEGWGGGGTRSVTFSRGFGDLAVLKVGGRTLTVSVGDGLPKSSKPTRKGMAKGKPRRSSQAPTRAAPAPPRGMDRNGVPPSARGGPLPLEIMSGGGTHRPPRGPPSTSLGASRRPRARPPSEHNTEFLNVPDQGMAGMQRKRSVGQRPVPGVGRPKPQPRTHGPRCRALYQYVGQDVDELSFNVNEVIEILMEDPSGWWKGRLHGQEGLFPGNYVEKI

SEQ ID NO: 25 - DNA, 3259 bp, Homo sapiens
  misc_feature (1)..(3259): myosin IG (MYO1G)
ggggcagggcgggggcggtggggcctcccctagccttccctccccctctccttcactgtccttccagcaggcacaggaaggtgaggcaaggtgtttccagccggcaggatggaggacgaggaaggccctgagtatggcaaacctgactttgtgcttttggaccaagtgaccatggaggacttcatgaggaacctgcagctcaggttcgagaagggccgcatctacacctacatcggtgaggtgctggtgtccgtgaacccctaccaggagctgcccctgtatgggcctgaggccatcgccaggtaccagggccgtgagctctatgagcggccaccccatctctatgctgtggccaacgccgcctacaaggcaatgaagcaccggtccagggacacctgcatcgtcatctcaggggagagtggggcagggaagacagaagccagtaagcacatcatgcagtacatcgctgctgtcaccaatccaagccagagggctgaggtggagagggtcaaggacgtgctgctcaagtccacctgtgtgctggaggcctttggcaatgcccgcaccaaccgcaatcacaactccagccgctttggcaagtacatggacatcaactttgacttcaagggggacccgatcggaggacacatccacagctacctactggagaagtctcgggtcctcaagcagcacgtgggtgaaagaaacttccacgccttctaccaattgctgagaggcagtgaggacaagcagctgcatgaactgcacttggagagaaaccctgctgtatacaatttcacacaccagggagcaggactcaacatgactgtgcacagtgccttggacagtgatgagcagagccaccaggcagtgaccgaggccatgagggtcatcggcttcagtcctgaagaggtggagtctgtgcatcgcatcctggctgccatattgcacctgggaaacatcgagtttgtggagacggaggagggtgggctgcagaaggagggcctggcagtggccgaggaggcactggtggaccatgtggctgagctgacggccacaccccgggacctcgtgctccgctccctgctggctcgcacagttgcctcgggaggcagggaactcatagagaagggccacactgcagctgaggccagctatgcccgggatgcctgtgccaaggcagtgtaccagcggctgtttgagtgggtggtgaacaggatcaacagtgtcatggaaccccggggccgggatcctcggcgtgatggcaaggacacagtcattggcgtgctggacatctatggcttcgaggtgtttcccgtcaacagtttcgagcagttctgcatcaactactgcaacgagaagctgcagcagctattcatccagctcatcctgaagcaggaacaggaagagtacgagcgcgagggcatcacctggcagagcgttgagtatttcaacaacgccaccattgtggatctggtggagcggccccaccgtggcatcctggccgtgctggacgaggcctgcagctctgctggcaccatcactgaccgaatcttcctgcagaccctggacacgcaccaccgccatcacctacactacaccagccgccagctctgccccacagacaagaccatggagtttggccgagacttccggatcaagcactatgcaggggacgtcacgtactccgtggaaggcttcatcgacaagaacagagatttcctcttccaggacttcaagcggctgctgtacaacagcacggaccccactctacgggccatgtggccggacgggcagcaggacatcacagaggtgaccaagcgccccctgacggctggcacactcttcaagaactccatggtggccctggtggagaaccttgcctccaaggagcccttctacgtccgctgcatcaagcccaatgaggacaaggtagctgggaagctggatgagaaccactgtcgccaccaggtcgcatacctggggctgctggagaatgtgagggtccgcagggctggcttcgcttcccgccagccctactctcgattcctgctcaggtacaagatgacctgtgaatacacatggcccaaccacctgctgggctccgacaaggcagccgtgagcgctctcctggagcagcacgggctgcagggggacgtggcctttggccacagcaagctgttcatccgctcaccccggacactggtcacactggagcagagccgagcccgcctcatccccatcattgtgctgctattgcagaaggcatggcggggcaccttggcgaggtggcgctgccggaggctgagggctatctacaccatcatgcgctggttccggagacacaaggtgcgggctcacctggctgagctgcagcggcgattccaggctgcaaggcagccgccactctacgggcgtgaccttgtgtggccgctgccccctgctgtgctgcagcccttccaggacacctgccacgcactcttctgcaggtggcgggcccggcagctggtgaagaacatccccccttcagacatgccccagatcaaggccaaggtggccgccatgggggccctgcaagggcttcgtcaggactggggctgccgacgggcctgggcccgagactacctgtcctctgccactgacaatcccacagcatcaagcctgtttgctcagcgactaaagacacttcgggacaaagatggcttcggggctgtgctcttttcaagccatgtccgcaaggtgaaccgcttccacaagatccggaaccgggccctcctgctcacagaccagcacctctacaagctggaccctgaccggcagtaccgggtgatgcgggccgtgccccttgaggcggtgacggggctgagcgtgaccagcggaggagaccagctggtggtgctgcacgcccgcggccaggacgacctcgtggtgtgcctgcaccgctcccggccgccattggacaaccgcgttggggagctggtgggcgtgctggccgcacactgccagggggagggccgcaccctggaggttcgcgtctccgactgcatcccactaagccatcgcggggtccggcgcctcatctccgtggagcccaggccggagcagccagagcccgatttccgctgcgctcgcggctccttcaccctgctctggcccagccgctgagcgcccgcacccgccgcaccccgaggccgccaattgtccgccccgccagcgctgcaaataaaccttctgagtcagccaaaaaaaaaaaaaaaaa

SEQ ID NO: 26 - protein, 1018 aa, Homo sapiens
  MISC_FEATURE (1)..(1018): myosin IG (MYO1G)
MEDEEGPEYGKPDFVLLDQVTMEDFMRNLQLRFEKGRIYTYIGEVLVSVNPYQELPLYGPEAIARYQGRELYERPPHLYAVANAAYKAMKHRSRDTCIVISGESGAGKTEASKHIMQYIAAVTNPSQRAEVERVKDVLLKSTCVLEAFGNARTNRNHNSSRFGKYMDINFDFKGDPIGGHIHSYLLEKSRVLKQHVGERNFHAFYQLLRGSEDKQLHELHLERNPAVYNFTHQGAGLNMTVHSALDSDEQSHQAVTEAMRVIGFSPEEVESVHRILAAILHLGNIEFVETEEGGLQKEGLAVAEEALVDHVAELTATPRDLVLRSLLARTVASGGRELIEKGHTAAEASYARDACAKAVYQRLFEWVVNRINSVMEPRGRDPRRDGKDTVIGVLDIYGFEVFPVNSFEQFCINYCNEKLQQLFIQLILKQEQEEYEREGITWQSVEYFNNATIVDLVERPHRGILAVLDEACSSAGTITDRIFLQTLDTHHRHHLHYTSRQLCPTDKTMEFGRDFRIKHYAGDVTYSVEGFIDKNRDFLFQDFKRLLYNSTDPTLRAMWPDGQQDITEVTKRPLTAGTLFKNSMVALVENLASKEPFYVRCIKPNEDKVAGKLDENHCRHQVAYLGLLENVRVRRAGFASRQPYSRFLLRYKMTCEYTWPNHLLGSDKAAVSALLEQHGLQGDVAFGHSKLFIRSPRTLVTLEQSRARLIPIIVLLLQKAWRGTLARWRCRRLRAIYTIMRWFRRHKVRAHLAELQRRFQAARQPPLYGRDLVWPLPPAVLQPFQDTCHALFCRWRARQLVKNIPPSDMPQIKAKVAAMGALQGLRQDWGCRRAWARDYLSSATDNPTASSLFAQRLKTLRDKDGFGAVLFSSHVRKVNRFHKIRNRALLLTDQHLYKLDPDRQYRVMRAVPLEAVTGLSVTSGGDQLVVLHARGQDDLVVCLHRSRPPLDNRVGELVGVLAAHCQGEGRTLEVRVSDCIPLSHRGVRRLISVEPRPEQPEPDFRCARGSFTLLWPSR

SEQ ID NO: 27 - DNA, 3807 bp, Homo sapiens
  misc_feature (1)..(3807): myosin IH (MYO1H)
aaagaagacgtgaggaggaaacacatccgtctgcacatggaaggggcgctgactgcccgggacaaggtcggggttcaggattttgtgctattggacgcgtacaccagcgaatctgcctttgtcgacaacctccgcaagcgtttcagcgagaacctcatatacacatatattggcaccctccttgtgtctgtgaatccataccaggagctcggaatctacactgtgagccagatggaactttatcaaggggtcaatttctttgaactgccaccacatgtctacgctatagccgacaacgcttaccgaatgatgtgtgctgaactaaataaccatttcatcctcatttctggagagagtggggcagggaaaacagaggcctccaagaaaattctcgagtattttgcagtgacctgcccaatgacccagtcactacaaatagcccgtgacagactgctgttctccaacccagtgctggaggcttttggaaatgccagaacgctccggaatgacaactccagcagatttgggaaatacatggatatacaatttgattttcagggcattcccgtaggtgggcatatcatcagttacttgatagagaagtcccgagttgtctaccaaaacgaaggcgagcggaatttccacatcttctaccagctgctggcaggtggcgaagaggagcgcctgtcttacctgggactcgagcgagacccccagctgtataaatacctctcacagggtcattgtgccaaagagtcatccattagtgacaagaatgactggaaaactgtttccaacgccttttctgtcattgattttactgaagctgacctcgagaatctctttggaattattgccagtgtcttacacctggggaacattggttttgaagaagacgaccaaggctgtgccactatcccagacacccatgagatcaagtggatagccaagctcctgggggtccacccatcagtccttctggaagctctcacccacagaaaaattgaagccaaaactgaggaggtgatctgcccgttgacactagaactctctgtctacgctagagatgcaatggcaaaggctgtttatggacgaacgtttacttggctggtcaacaaaatcaattcctccttagttaacaaggttggtcaacgcattttggatcccttgctcttgctcacgtggaaaactgtaattggattactggacatctatgggtttgaagtctttgacaagaatggttttgaacagttctgtataaattactgcaatgagaaactccagcaactgttaattgagaggactctaaaagcagaacaggcagaatatgaaatggaaggcatagagtgggagccaattaaatatttcaacaacaagatcatctgtgatttggtagaagagagacataaaggaatcatatctattctggatgaagaatgcattcggcctggtcctgctacagacttgagtttcctggagaaattggaagagaaagtgggcaaacatgcacacttcgaaacccgtaagctggctggtccaaagggccgaaagaggattggctggatggagttccgactcctccactatgcaggagaggtcacatactgcaccaagggattcttggaaaaaaacaatgatcttctttacagacatctgaaagaagtgctgtgcaagtccaagaacattatcctgagggaatgcttcctgctggccgagttagaaaaccggaggaggcccccaacagtggggactcagtttaaaaacagtctgagcagccttctagaaaccctcatctctaaggagccctcctacatccgttgcatcaagcccaacgacaggaaagaacccagcaaatttgatgacttcctcataaggcatcagatcaaatacctggggctgatggagcacctgcgggtgagacgggctggttttgcataccgaaggaaatacgagcatttcttgcaaaggtacaagtccttatgcccagacacctggccgcactggcacgggcctccagcagagggcgtggaacggctgatcaagtacatcggctacaaacccgaggaatacaagttaggcaaaaccaaaatattcattcgtttccccagaactctgtttgctaccgaagatgcctttgaatttagtaaacatcaactagttgcaagaatccaagccacttacaaacgctgcctaggaaggagagaatacgtgaaaaaaagacaagcagccatcaaactggaagcccactggcgtggggccctggctcggaaggcaatccaaaggagaaagtgggccgtgcggattatcagaaagttcattaaaggattcatcagtcgcaacaaacccctctgtcctgacaacgaggaatttatcgtgtttgtgcggaagaattacatcttgaatctccggtatcaccttccaaagactgtcctggacaagagctggctgaggcctcctggcatcttggaaaatgcatcagatctgctcaggaaaatgtgcgtgaggaacctggtgcagaagtactgccgcgggatcacagctgagcggaaagcaatgatgcagcaaaaggtagttacaagtgaaatcttcaggggaaggaaagacggctacacagaaagtttaaatcaaccctttgtcaacagtcggatagatgaaggagacattaatccgaaagtgcttcagctaattagccatgagaaaatccagtatggtgtcccggtcattaaatatgacagaaaaggcttcaaagcacggcagcggcaactcattcttactcagaaagcagcttacgtggtggaacttgccaaaatcaagcagaaaatagagtactcagctctcaaaggtgtctccactagcaatctgagtgatggaatcttagtcattcatgtttcaccagaggacagcaagcaaaagggggatgccgttttgcagtgtggacacgtgtttgaagcagttactaaactcgtcatgctggttaagaaggagaacattgtcaatgttgttcaaggaagtttacagttttttattagtccgggaaaagaaggcacaatagttttcgacactggactggaagaacaagtctataaaaataaaaatggacaattaacagtggtgtcagtccggaggaagtcctgatagaggatgacgtctgacctctaccatcgccatttttgctccaactgaggaaactacaggggaagtggggattggatccagttagctacctcttcaaggtaccaggcccgcagcactaacagatcacatctgcaaccctgaacgtgcaggttggagaacgaatgaatacaaattttattgtaaaataaaaatgtatataaagcatatgagcacacaaatggacaataaatgccacagcgcaaaagcgtgtagcgagcctgccacgcttgtgactggggaggggctccgtataatctcacctttgcaagcgtttatttactgatgtatgcggccaccactgtgaccaccatcacttaccgattcaccaaaacttaggtaatatggtcttatttttgatttaattaaatatacgtgtagctcatgtatttcacagtttaatatgagaagtgctttggtctttatttagaaattgggtgatgtttttgtgcccagcaacatgctgtaggaatttaactcttgtttacatccattagcctcatggttttgcttcaagtctcagcttccaagaacctatcgatgacttactgtgcatggtctgagactaagtaaaggaaatttcctaaagctgtgaaatttgaattttgctttaaataaatggaactcacatgtgtc

SEQ ID NO: 28 - protein, 1032 aa, Homo sapiens
  MISC_FEATURE (1)..(1032): myosin IH (MYO1H)
MEGALTARDKVGVQDFVLLDAYTSESAFVDNLRKRFSENLIYTYIGTLLVSVNPYQELGIYTVSQMELYQGVNFFELPPHVYAIADNAYRMMCAELNNHFILISGESGAGKTEASKKILEYFAVTCPMTQSLQIARDRLLFSNPVLEAFGNARTLRNDNSSRFGKYMDIQFDFQGIPVGGHIISYLIEKSRVVYQNEGERNFHIFYQLLAGGEEERLSYLGLERDPQLYKYLSQGHCAKESSISDKNDWKTVSNAFSVIDFTEADLENLFGIIASVLHLGNIGFEEDDQGCATIPDTHEIKWIAKLLGVHPSVLLEALTHRKIEAKTEEVICPLTLELSVYARDAMAKAVYGRTFTWLVNKINSSLVNKVGQRILDPLLLLTWKTVIGLLDIYGFEVFDKNGFEQFCINYCNEKLQQLLIERTLKAEQAEYEMEGIEWEPIKYFNNKIICDLVEERHKGIISILDEECIRPGPATDLSFLEKLEEKVGKHAHFETRKLAGPKGRKRIGWMEFRLLHYAGEVTYCTKGFLEKNNDLLYRHLKEVLCKSKNIILRECFLLAELENRRRPPTVGTQFKNSLSSLLETLISKEPSYIRCIKPNDRKEPSKFDDFLIRHQIKYLGLMEHLRVRRAGFAYRRKYEHFLQRYKSLCPDTWPHWHGPPAEGVERLIKYIGYKPEEYKLGKTKIFIRFPRTLFATEDAFEFSKHQLVARIQATYKRCLGRREYVKKRQAAIKLEAHWRGALARKAIQRRKWAVRIIRKFIKGFISRNKPLCPDNEEFIVFVRKNYILNLRYHLPKTVLDKSWLRPPGILENASDLLRKMCVRNLVQKYCRGITAERKAMMQQKVVTSEIFRGRKDGYTESLNQPFVNSRIDEGDINPKVLQLISHEKIQYGVPVIKYDRKGFKARQRQLILTQKAAYVVELAKIKQKIEYSALKGVSTSNLSDGILVIHVSPEDSKQKGDAVLQCGHVFEAVTKLVMLVKKENIVNVVQGSLQFFISPGKEGTIVFDTGLEEQVYKNKNGQLTVVSVRRKS

SEQ ID NO: 29 - DNA, 5798 bp, Homo sapiens
  misc_feature (1)..(5798): myosin IIIA (MYO3A)
ggatggcgcggatggcgcggcctccacctgcgggcagtggagagagcggcgagaggaagaatattccccgcgagccgggataaggggccccttcggctcggttgacccaggtcagatcctcccgccgaccttcggcccgccctctacaggcggcccagttcttcccctgctcggctgcccctgcccgcccctcgagggagcgcccgtagccagcgcccccgtaaagaaataaggaggcgcccggcttcccgcccaggcccagggccccagtgcagcctggacacagtattcaaagttttggcgtctgagcattgttatgcgttattttcaagctttgctaacggtttttaaacctttgagatgtttccattaattggaaaaacaatcatctttgataactttcctgatccttctgatacatgggaaatcactgagacaattggcaaaggaacttatgggaaagtttttaaagtattgaataagaaaaatggccaaaaagcagcagtcaaaattcttgatccaattcacgatattgacgaagagattgaagcagaatataacatcttaaaagcactttctgaccaccctaatgtggtcagattctatgggatatactttaagaaggataaagtaaatggagacaagctgtggttggttcttgagctctgcagtggaggatcagtgactgaccttgtgaaaggatttctgaagaggggtgaaagaatgagtgagcctctaattgcctatattttacatgaagcactaatgggacttcaacatttgcataacaacaaaactatccacagagatgtgaaaggcaataacattctattgaccacggaaggtggagtgaaactagtagattttggtgtgtctgcacagctcaccagtacccggcaccgtcggaacacatccgtaggaacaccgttttggatggctcctgaggtgattgcatgtgaacagcaattggataccacttatgacgccagatgtgacacttggtccctgggtatcacggccattgagctgggtgatggagatcctccactagctgaccttcatcccatgagagcactcttcaaaataccaaggaatccacccccaaaactaaggcagcctgagctatggtcagcagaattcaatgacttcataagcaagtgcttgactaaagattatgaaaagcgtccaacagtgtcagaacttttacagcataaattcattactcaaattgagggcaaagatgtgatgctacaaaaacaactaacggaattcattggcatccatcaatgcatgggaggcacagaaaaggccagacgtgaacgtattcacacgaagaaagggaacttcaaccgacctctaatatccaatctgaaggatgtagatgatttagcaaccctagaaattttggatgagaatacagtctcagagcaacttgagaagtgttattccagagatcagatctacgtctatgtgggagacatactcattgctcttaacccttttcagagtctgggtctttactccacaaagcattccaaactatatattggatcaaagagaactgccagtcctcctcacatttttgcaatggctgacttaggatatcaatctatgataacatataattcagatcagtgcattgttatttctggagaaagtggtgctggaaagactgaaaatgctcatcttttagttcagcagctgacagtgcttggaaaggctaataacagaaccttgcaagagaagattttacaagtgaacaatttggtagaagcctttggcaatgcctgcactattataaatgacaattctagcagatttggaaaatacttagaaatgaaattcacctcttctggagcggtagtgggagcacagatttctgaatatctcctggaaaaatcccgagttatccaccaagctattggagaaaaaaattttcatattttttactacatttatgctggtttggctgaaaagaagaaactagcccattacaaactgcctgaaaataagcctcccaggtacctacaaaatgaccacctcagaacagtacaagacatcatgaataatagtttctataaatcccagtatgaattaattgagcaatgtttcaaagtcataggttttacaatggagcaacttggtagtatatacagcatactcgctgcaatcttgaatgttggcaacattgaattttcttctgtggcaactgaacaccagattgacaagagccacatttctaatcatacagccctggagaactgtgcttctttgctttgcattcgggcagatgagctacaagaagctctcacctcccactgtgtggtcactagaggagaaacaattatacgacccaatactgtagaaaaagctaccgatgtcagggatgccatggctaaaactttatatggacgtctctttagttggatagtcaattgcattaacagtttgttgaagcatgactcatcaccaagtgggaatggtgatgagctgagcattggcattcttgatatatttggctttgaaaatttcaaaaaaaattccttcgagcagctgtgcattaacattgcaaatgaacaaattcagtattattataatcaacatgtgtttgcatgggaacagaatgaatacctaaatgaagatgtggatgctagagttattgaatatgaggataactggcccctcttagatatgtttctgcaaaagccaatgggtttactttccctacttgatgaagaaagtagatttcccaaggccactgaccagactcttgtagaaaaatttgaaggtaacctgaaatcacaatacttctggagacccaaaagaatggaacttagttttggaattcaccattatgcaggaaaggtcctctataatgcaagtggattcttagccaaaaacagagacactcttcctactgacattgtgctacttttgaggtcatccgacaacagtgtaattaggcaactagtcaaccaccctctgaccaaaacaggtaatctgccacattctaaaactaaaaatgttataaactatcaaatgaggacttcagaaaaattaatcaacctggcaaagggcgacactggagaagccacacgtcatgccagagagacaaccaacatgaaaacacaaacggttgcatcatattttagatattccctgatggatttgttgtctaaaatggtggtgggccaacctcattttgtccgttgcatcaaaccaaatagtgagcgtcaggcaagaaaatatgacaaagagaaagttctgctacagcttcggtacacaggaattctggaaacagcaagaattcgaagactaggattctcccatcggatactttttgctaactttataaagcggtactaccttctctgctacaagtcgagcgaggagccccgcatgagccctgacacctgtgccaccattttggaaaaagctggtctcgataactgggctcttggaaaaacaaaagtgttccttaagtattatcacgtggagcagttaaatctaatgcgaaaggaagctattgacaagcttattttgattcaagcttgtgtcagagcattcttgtgttcaagaagataccaaaaaatacaggagaaaaggaaagaaagcgctataataatacagtcagctgcaagaggacaccttgtcaggaaacaaagaaaagaaattgttgacatgaaaaacacagcagtaacaaccattcaaacttctgatcaggaattcgactacaagaaaaactttgaaaatacaagggaatctttcgtgaagaaacaagcagaaaatgcaatctctgctaatgaaagattcatttcagctccaaataataaaggaagtgtatctgtagtgaagacttccactttcaaacctgaagaggaaaccaccaatgctgtggagagtaacaacagagtgtatcagactccaaaaaaaatgaataatgtgtatgaggaagaggttaagcaagaattctaccttgtagggccagaagtaagccccaaacagaagtctgtcaaagacctggaagagaacagcaatctaaggaaagtggagaaagaggaagctatgatccagagttactatcagaggtacacagaggagaggaattgtgaagagtcaaaagcagcatatctagaaaggaaggccatatcagaaaggccaagctacccagtgccttggttagctgaaaatgagacttcctttaaaaaaactttggaacctacacttagccaaaggtcaatttatcaaaatgcaaacagcatggaaaaagaaaagaagacatctgtagttacccagcgtgcaccgatatgcagccaggaggaaggcagaggccgtctgaggcatgagacagtcaaagagaggcaagttgaaccagtgacacaggcccaggaggaagaagataaagcagcggtattcattcagagcaaataccggggttacaagagaaggcagcagttgaggaaggacaagatgtcttcttttaagcatcagaggattgtcacaacaccaacagaagtagcaagaaacactcataatttgtattcctatcccacaaaacatgaggaaatcaataacatcaagaagaaggataacaaagactcgaaagcaacttcagaaagagaagcatgtggtttggcaattttttcaaaacagatatcaaagttatctgaagaatatttcattctgcagaaaaaattgaatgaaatgattttgtcacagcaactgaagtcactttatctgggtgtctcgcaccataagccaattaatagacgagtttcttctcagcagtgcctctcaggtgtctgtaaaggagaggagccaaaaatattgagacccccaagacgaccccggaaacccaaaacattaaataaccctgaagactccacatactattatctacttcataagtcaatccaagaagaaaaacgaagaccaaggaaagacagtcagggaaaattattagatttggaagatttctattataaggaatttttgcccagtcgttctggaccaaaggaacatagccctagtttaagagaacgaagaccacagcaagaactccagaatcaatgtattaaggctaatgaaaggtgctgggcggcggagagccccgagaaggaggaggagagagagccagcagccaacccctacgacttcaggaggctcctgcgcaaaacctcccagcgccggcgcctcgtccagcagtcctaaccgttcaacgaggcagtcaccgccgtcggaaggcgctggagcctgcggggcagcaggggccaagcaggcactctggggctggcaccagcaggcactgaagctgcggccctgatctccgcagaggctgcctgctgcgctcggccctcaagtgcccgggccggccttcgtgctccgaaacaagagacctgggagccctcgggaaacctcccccgacgctctctctcggaactcccgcaccctcctttctcaccagcccgccagttgtggcaaccctgtccttgttcccctaatctatcactttgttctttttttttgtgactcctgtggactccactgcgcctgggatctcgccaacccctctctcatttggggtgactgaattcacagatttttttttttattggaaacggcttttcttggccaacagaacacttgctagcggttgaatcttagagaaaaaagcccgggaggggtggggagaatttcgaagatgtatttcatctcaagcttgctctttctcttcctttggttattaaggtcactaaataaaggaagtgccttggaaaacccgtgaaaaaaaaaaaaaa

SEQ ID NO: 30 - protein, 1616 aa, Homo sapiens
  MISC_FEATURE (1)..(1616): myosin IIIA (MYO3A)
MFPLIGKTIIFDNFPDPSDTWEITETIGKGTYGKVFKVLNKKNGQKAAVKILDPIHDIDEEIEAEYNILKALSDHPNVVRFYGIYFKKDKVNGDKLWLVLELCSGGSVTDLVKGFLKRGERMSEPLIAYILHEALMGLQHLHNNKTIHRDVKGNNILLTTEGGVKLVDFGVSAQLTSTRHRRNTSVGTPFWMAPEVIACEQQLDTTYDARCDTWSLGITAIELGDGDPPLADLHPMRALFKIPRNPPPKLRQPELWSAEFNDFISKCLTKDYEKRPTVSELLQHKFITQIEGKDVMLQKQLTEFIGIHQCMGGTEKARRERIHTKKGNFNRPLISNLKDVDDLATLEILDENTVSEQLEKCYSRDQIYVYVGDILIALNPFQSLGLYSTKHSKLYIGSKRTASPPHIFAMADLGYQSMITYNSDQCIVISGESGAGKTENAHLLVQQLTVLGKANNRTLQEKILQVNNLVEAFGNACTIINDNSSRFGKYLEMKFTSSGAVVGAQISEYLLEKSRVIHQAIGEKNFHIFYYIYAGLAEKKKLAHYKLPENKPPRYLQNDHLRTVQDIMNNSFYKSQYELIEQCFKVIGFTMEQLGSIYSILAAILNVGNIEFSSVATEHQIDKSHISNHTALENCASLLCIRADELQEALTSHCVVTRGETIIRPNTVEKATDVRDAMAKTLYGRLFSWIVNCINSLLKHDSSPSGNGDELSIGILDIFGFENFKKNSFEQLCINIANEQIQYYYNQHVFAWEQNEYLNEDVDARVIEYEDNWPLLDMFLQKPMGLLSLLDEESRFPKATDQTLVEKFEGNLKSQYFWRPKRMELSFGIHHYAGKVLYNASGFLAKNRDTLPTDIVLLLRSSDNSVIRQLVNHPLTKTGNLPHSKTKNVINYQMRTSEKLINLAKGDTGEATRHARETTNMKTQTVASYFRYSLMDLLSKMVVGQPHFVRCIKPNSERQARKYDKEKVLLQLRYTGILETARIRRLGFSHRILFANFIKRYYLLCYKSSEEPRMSPDTCATILEKAGLDNWALGKTKVFLKYYHVEQLNLMRKEAIDKLILIQACVRAFLCSRRYQKIQEKRKESAIIIQSAARGHLVRKQRKEIVDMKNTAVTTIQTSDQEFDYKKNFENTRESFVKKQAENAISANERFISAPNNKGSVSVVKTSTFKPEEETTNAVESNNRVYQTPKKMNNVYEEEVKQEFYLVGPEVSPKQKSVKDLEENSNLRKVEKEEAMIQSYYQRYTEERNCEESKAAYLERKAISERPSYPVPWLAENETSFKKTLEPTLSQRSIYQNANSMEKEKKTSVVTQRAPICSQEEGRGRLRHETVKERQVEPVTQAQEEEDKAAVFIQSKYRGYKRRQQLRKDKMSSFKHQRIVTTPTEVARNTHNLYSYPTKHEEINNIKKKDNKDSKATSEREACGLAIFSKQISKLSEEYFILQKKLNEMILSQQLKSLYLGVSHHKPINRRVSSQQCLSGVCKGEEPKILRPPRRPRKPKTLNNPEDSTYYYLLHKSIQEEKRRPRKDSQGKLLDLEDFYYKEFLPSRSGPKEHSPSLRERRPQQELQNQCIKANERCWAAESPEKEEEREPAANPYDFRRLLRKTSQRRRLVQQS

SEQ ID NO: 31 - DNA, 5448 bp, Homo sapiens
  misc_feature (1)..(5448): myosin IIIB MYO3B transcript variant 1
ctagatcgaaagtcctttggtaatgatgtgtcatacattctagtcatcaaagacaccattttctgggcctgaagtgttctgctggtttttggaggaatgagaatccaatctctcataagccggattcagaaaataggtcatcgatgaaacatctgtatggattatttcactataatcctatgatgcttggacttgaatcacttccagatcccacagacacctgggaaattatagagaccattggtaaaggcacctatggcaaagtctacaaggtaactaacaagagagatgggagcctggctgcagtgaaaattctggatccagtcagtgatatggatgaagaaattgaggcagaatacaacattttgcagttccttcctaatcatcccaatgttgtaaagttttatgggatgttttacaaagcggatcactgtgtagggggacagctgtggctggtcctggagctgtgtaatgggggctcagtcactgagcttgtcaaaggtctactcagatgtggccagcggttggatgaagcaatgatctcatacatcttgtacggggccctcttgggccttcagcatttgcacaacaaccgaatcatccaccgtgatgtgaaggggaataacattcttctgacaacagaaggaggagttaagctcgttgactttggtgtttcagctcaactcaccagtacacgtctgcggagaaacacatctgttggcaccccattctggatggcccctgaggtcattgcctgtgagcagcagtatgactcttcctatgacgctcgctgtgacgtctggtccttggggatcacagctattgaactgggggatggagaccctcccctctttgacatgcatcctgtgaaaacactctttaagattccaagaaatcctccacctactttacttcatccagaaaaatggtgtgaagaattcaaccactttatttcacagtgtcttattaaggattttgaaaggcgaccttccgtcacacatctccttgaccacccatttattaaaggagtacatggaaaagttctgtttctgcaaaaacagctggccaaggttctccaagaccagaagcatcaaaatcctgttgctaaaaccaggcatgagaggatgcataccagaagaccttatcatgtggaagatgctgaaaaatactgccttgaggatgatttggtcaacctagaggttctggatgaggatacaattatccatcagttgcagaaacgttatgcagacttgctaatttacacatatgttggagacatcttaattgccttaaaccccttccagaatctaagcatatactctccacagttttccagactttatcatggggtgaaacgcgcctccaatcccccccacatatttgcatcagcagatgctgcttaccagtgcatggttactctcagcaaagaccagtgcattgtcatcagcggagagagtggctctgggaagacagaaagcgcccacctgattgttcaacatttgactttcttgggaaaggccaataatcagaccttgagagagaaaattctacaagtcaactccctggtggaagcctttgggaactcatgcactgccatcaatgacaactcgagccgttttggaaaatatctggaaatgatgtttacaccaactggagttgtgatgggggcaagaatctctgaatatctcctggaaaaatccagagttataaaacaggcagcgagagagaaaaattttcatatattttactatatttatgctggtcttcatcaccaaaagaagctttctgatttcagacttcctgaggaaaaacctcctaggtacatagctgatgaaactggaagggtgatgcacgacataacttccaaggagtcttacagaagacaattcgaagcaattcagcattgcttcaggattatagggttcacggacaaagaggtgcactcagtgtacagaattttggctgggattttgaatattgggaacattgagttcgcagctatttcctctcaacatcagactgataaaagtgaggtgcccaatgctgaagctttgcaaaatgctgcctctgttctgtgcattagccctgaagagctccaggaggccctcacctcccactgtgtggtcacccggggcgagaccatcatccgtgccaacactgtagacagggctgcggacgttcgagacgccatgtccaaagccctgtatgggaggctcttcagctggattgtgaatcgcattaatacactcctgcagccagacgaaaacatatgtagtgcaggaggtggaatgaatgtggggatcttggatatctttggattcgagaattttcagagaaattcatttgagcagctctgcataaacatcgccaatgagcaaatccagtactatttcaatcagcatgtttttgctcttgagcagatggaatatcagaatgaaggcattgatgctgtacccgtggaatatgaggacaaccgcccgctcttggacatgttcctccagaaacccctgggactgcttgcacttttggatgaggaaagtcggtttccccaagcaactgaccagaccctggttgataaatttgaagataatctacgatgcaaatacttctggaggcccaaaggagtggaactgtgctttggcattcagcattatgctggaaaggtattatatgatgcttctggggttcttgagaaaaatagagacactctccctgccgatgtggttgtggtcctgagaacgtcagaaaacatgcttcttcagcagctcttctcaatccctctgaccaaaacaggtaatttggcccagacaagagctaggataacagtggcctcaagttctttgcctccacatttcagtgctgggaaagccaaggtggacactctggaggtgatacggcatccggaagaaaccaccaacatgaagaggcaaactgtggcttcttacttccggtattctctgatggacctgctctccaaaatggtggttggacagccccactttgtgcgctgcattaaacccaatgatgaccgagaggccctgcagttctctcgagagagggtgctggcccagctccgctccacagggattctggagacagtcagcatccgccgccagggctattcccaccgcatcctttttgaagaatttgtgaaaaggtattattacttggcattcacagcacatcaaacacctcttgctagcaaagagagctgtgtggctatcttggaaaagtccagattagatcactgggtgctgggaaaaacaaaggtttttctcaaatattaccatgttgagcaattaaatttgctgcttcgagaagtcataggcagagtggttgtgctgcaggcatataccaaggggtggcttggagccaggagatacaaaaaggtcagagagaagagagagaagggagccattgccatccagtcaggggacacttcaaaccaaagcagtgggccacattcccccgtcgcagcaggtacgaggggaagtgccgaggttcaagactgcagcgagcctggtgaccataaagttctcaggggctctgtacatcgtaggagccattcacaagcagaatccaacaatggccgtacacagacttcaagcaactctcctgctgtcacagagaaaaatgggcattcacaagcccagagttctccaaaagggtgcgatatcttcgcaggacatgcaaacaagcactcggtttctgggactgatttgctgtcttctcggatatgccatcctgctccagatcagcaaggattgagtctctggggagcccctcaaaagcctggttcagaaaatggtcttgcacagaagcatcgaacacctcgccgacgatgtcagcagcccaaaatgctgagtagccctgaggacaccatgtactataaccagttaaatggaactctagaatatcaagggagcaagaggaagccaagaaaacttggccaaatcaaagtacttgatggggaagatgaatattacaaatctctgtcaccagtggactgtatccctgaggagaacaactcagcccacccttcctttttttcttcatcctcaaaaggagactcttttgctcaacattaaattgtgcttcctaaccctaaatctgtccagagtaggaacattcatggtaatcgactgtctgtcattgcgtaagaaagcactgatatggggtcagcttctttggacatatggtccatgcctgaaccttactgaaccacttgcagattccaaaacatcttatcctatcctctaccactctcccacatgtgttgtgcagcctgagctgggcgctgccttcctttctcatcccatggggccctgtgggacactgagaacacctttacaatagtttaaacagtcattcatgcccccagtgtctaggaagataacagccagtctcaccccagtctaatcatggaccctgataatattgcttgatttttcctatcaagttacttttcaatccattcagaatctgccccagtggagacccaggagttcctttcctgcactcttctccatcctcccacctttgctgggcttttctatcactcccacctcccccagagtcagggctccattgctgagtgccccatcctggaggattggccccaagatctcctagaacaggataattgcctgtgtttaggcagataggcctaaatctttcagattctttctacaaggcaaataacccctctcttgttaattatgatgctgagaaagcctctgtctctttatttcaccttgccaagacacccacactactttggtgatgaaaagaaaggaatgagagggaaagtttggacctgtcactttggtgacagggaaagtccaggtcactttattctgtaactctccattcactggtcaaataactccatgaggctatcagtggctacagtggaaggacctgatcttgtccatctttgtgtgcacagagcctagcacagggcttggtagagggtatatctagtgaatggagaatacatggagaaacttaactaagttacacaagcatatctgacaggaatgttaccttcaattgtatgttacatatgattagtcacttttcatacactataacctctgatttttcactcaagtttgggctgattatattgtaatgatgttagataatactcaacatgattcagtatgacaaacttttttgagcacctactttatataaaacatgacaaattgcagtgtgatgtaatcaaaaacaaagaagccctataagaccatttctctagaacagatgttcttaatatttttcttactctaaaatatgtggtagatagtatgcaagaaaagccgggtgcggtggctcaggcctgtaatcccagcactttgggaggccaagatgggcggatcatgaagtcaggagttcgagaccagcctgaccaacatggtgaaaccccgtctctactaaaaaaaa

SEQ ID NO: 32 - protein, 1314 aa, Homo sapiens
  MISC_FEATURE (1)..(1314): myosin IIIB MYO3B transcript variant 1
MKHLYGLFHYNPMMLGLESLPDPTDTWEIIETIGKGTYGKVYKVTNKRDGSLAAVKILDPVSDMDEEIEAEYNILQFLPNHPNVVKFYGMFYKADHCVGGQLWLVLELCNGGSVTELVKGLLRCGQRLDEAMISYILYGALLGLQHLHNNRIIHRDVKGNNILLTTEGGVKLVDFGVSAQLTSTRLRRNTSVGTPFWMAPEVIACEQQYDSSYDARCDVWSLGITAIELGDGDPPLFDMHPVKTLFKIPRNPPPTLLHPEKWCEEFNHFISQCLIKDFERRPSVTHLLDHPFIKGVHGKVLFLQKQLAKVLQDQKHQNPVAKTRHERMHTRRPYHVEDAEKYCLEDDLVNLEVLDEDTIIHQLQKRYADLLIYTYVGDILIALNPFQNLSIYSPQFSRLYHGVKRASNPPHIFASADAAYQCMVTLSKDQCIVISGESGSGKTESAHLIVQHLTFLGKANNQTLREKILQVNSLVEAFGNSCTAINDNSSRFGKYLEMMFTPTGVVMGARISEYLLEKSRVIKQAAREKNFHIFYYIYAGLHHQKKLSDFRLPEEKPPRYIADETGRVMHDITSKESYRRQFEAIQHCFRIIGFTDKEVHSVYRILAGILNIGNIEFAAISSQHQTDKSEVPNAEALQNAASVLCISPEELQEALTSHCVVTRGETIIRANTVDRAADVRDAMSKALYGRLFSWIVNRINTLLQPDENICSAGGGMNVGILDIFGFENFQRNSFEQLCINIANEQIQYYFNQHVFALEQMEYQNEGIDAVPVEYEDNRPLLDMFLQKPLGLLALLDEESRFPQATDQTLVDKFEDNLRCKYFWRPKGVELCFGIQHYAGKVLYDASGVLEKNRDTLPADVVVVLRTSENMLLQQLFSIPLTKTGNLAQTRARITVASSSLPPHFSAGKAKVDTLEVIRHPEETTNMKRQTVASYFRYSLMDLLSKMVVGQPHFVRCIKPNDDREALQFSRERVLAQLRSTGILETVSIRRQGYSHRILFEEFVKRYYYLAFTAHQTPLASKESCVAILEKSRLDHWVLGKTKVFLKYYHVEQLNLLLREVIGRVVVLQAYTKGWLGARRYKKVREKREKGAIAIQSGDTSNQSSGPHSPVAAGTRGSAEVQDCSEPGDHKVLRGSVHRRSHSQAESNNGRTQTSSNSPAVTEKNGHSQAQSSPKGCDIFAGHANKHSVSGTDLLSSRICHPAPDQQGLSLWGAPQKPGSENGLAQKHRTPRRRCQQPKMLSSPEDTMYYNQLNGTLEYQGSKRKPRKLGQIKVLDGEDEYYKSLSPVDCIPEENNSAHPSFFSSSSKGDSFAQH

SEQ ID NO: 33 - DNA, 8704 bp, Homo sapiens
  misc_feature (1)..(8704): myosin IXA MYO9A
gcgcgaccgaagcggataagggacgcggcggcggttggctgtgtctgttgagagagtacaggacagcccggactgcgagaggcggcggcggaggcagtagttgcaccggcagaggcggccgctggcagcggttgaggcggcggtccaacgcgtgctctctgggcggggtgcggcgggggatgtgcctgctcaggccgggcggagtctctctgacagggcgggggatgcgccgcggccgctcgcccggaccctgaggctgctgggcccaccctcccggaaccgtccgaccctcggtggcctcggcctcttctgccatctccggtcctaccctggggcggagggtggaaggcagcttccgtcgaagaggagggggctgcggtggccaccgcggcggagcccgagttattttaccaagaaaatggtttgcacgactttgaacatatactatccatgctgatgggacaggatccaatatgaatataaatgatggaggaagacgacgctttgaagataatgaacatacattacggatatatcctggggctatttcagaagggacaatctactgtccgattcctgccagaaaaaactccacagctgctgaggtgattgagtctcttataaacaaacttcatcttgacaaaacaaaatgttatgttctagcagaggtaaaggaatttggtggagaagaatggattctcaatccaacagattgtccagttcagcgaatgatgctgtggccccgaatggctctggaaaatcgcttaagtggagaggactaccgcttccttctgagagagaaaaaccttgatggatcaatccattatggtagcctgcagtcatggctacgggtaacagaagaacgtcgcaggatgatggaacggggttttcttccacagcctcaacagaaagactttgatgatttatgtagtttacctgatttgaatgagaaaactctcttagaaaacctacgaaatcgctttaagcatgaaaaaatttatacctatgttggcagtattctaatagttattaacccattcaagtttcttcctatttataaccccaaatatgtcaaaatgtatgataaccaccaactgggaaaacttgagccccacatttatgctgtggctgatgtagcttatcatgccatgcttcagcgcaaaaagaatcagtgcatcgtgatttcaggagagagtggttctgggaagactcaaagcacaaactttcttattcaccaccttactgctctcagtcagaaaggatttgccagtggagtagaacagattattcttggagctggaccagtacttgaggcctttggaaatgcaaagacagctcataataacaattcaagtcgttttgggaagtttattcaagtaaattaccaggaaacaggcactgtacttggtgcctatgttgaaaaatatctactggagaagtccagactcgtttatcaggagcataatgaacggaactatcatgtattctattacctcctggcaggagcaagtgaagatgagagatcagcattccatcttaagcaaccagaggaatatcattatctcaatcagataacaaagaaacccctcagacagagctgggatgattattgctatgactctgagccggattgcttcacggtggaaggagaagatttgagacatgactttgagcgcctacaacttgccatggaaatggtaggatttcttcccaagacacgaagacagattttctctcttctctcagccatactacatttgggtaatatctgttacaaaaagaagacataccgggatgactccattgatatctgtaatcctgaagttctgcctattgtctcagaattattagaggttaaagaagagatgctatttgaagcattagttacaaggaagacggtgacagtgggagaaaagcttattttgccatacaagttggcagaggctgtgacagtgaggaactccatggctaagtctctgtatagtgccctgtttgactggatagtttttcgaattaatcatgcacttctgaatagtaaagatttagagcataataccaagacattgtctattggtgttcttgatatttttgggtttgaagattatgaaaataacagctttgaacagttctgtattaattttgctaatgaacgtttacagcactactttaatcagcatatctttaaattggaacaagaggaatatagaactgaaggtatcagctggcacaacatagattacattgataatacctgctgcataaatcttattagcaaaaaaccaacaggactgcttcatcttttggatgaagaaagcaactttccacaggctacaaatcaaacattgctagacaagtttaagcatcaacatgaagataattcttacatcgaatttccagccgtgatggagcctgctttcattataaaacattatgctggaaaagtaaaatatggggtaaaggatttccgggaaaaaaatacagatcatatgcgcccagacattgtagctcttctgagaagcagcaagaatgcatttatctctgggatgattggaattgatcctgtagctgttttccgatgggcaattctccgagcttttttcagagccatggttgctttcagggaagctgggaaaagaaacattcacagaaaaactggacatgatgatacagcgccatgtgcaattttgaaaagtatggatagttttagctttctccaacacccagtccaccagaggagcttagagattctgcagagatgcaaggaagagaagtacagtataacccggaaaaatcccagaacacctctttctgatctccagggcatgaatgctctaaatgaaaaaaaccaacatgatacatttgatattgcctggaatggcagaactgggattcgccagagcagactatcaagtggcacctccttgcttgataaagatggaatatttgctaattcaactagcagcaaactcctggagagagcccatggaattctcacgagaaacaaaaatttcaaatccaagcctgcccttccaaagcacttgctagaagtaaattctttaaagcacctgacaagactgacactacaagatcgcattaccaagtctcttcttcatttacacaagaagaaaaaacctcccagcatcagtgcccagtttcaggcatcattaagcaagctaatggaaacacttggtcaagcagaaccatattttgtaaaatgcattcgctctaatgctgaaaagctgcccttaaggttcagtgatgtcttggtacttagacagcttcgatacaccgggatgctggaaacagttcgaattcgccaatcaggatacagctccaaatattctttccaggattttgtgagccacttccatgtacttcttccccgaaatattattccatccaaatttaacattcaggatttcttcaggaaaataaatcttaatccagataattatcaagttggaaaaaccatggtctttctaaaggagcaggaacgacagcacttacaagatctgcttcaccaagaggtgctccgcagaatcatattgttgcagcgatggttcagggtcttgctgtgtaggcagcatttcctccatctgagacaagcatctgttattatccagagattctggaggaattacctaaatcagaagcaagtcagagatgcagctgtgcagaaggatgcttttgttatggctagtgcagctgctcttctccaagcttcctggcgtgctcacttagagaggcagcggtacttggagttacgggctgcagccatcgttatccagcagaaatggagagattactataggcgcaggcacatggctgctatttgcatacaagcaagatggaaagcctacagggaaagtaaaaggtaccaagaacaaaggaaaaaaattatccttttgcaatcaacatgtagaggattcagagcaagacaaagatttaaagctttaaaagaacaaaggctaagagaaacaaagccagaagttggattggtgaatattaagggatatggatctctggaaattcagggttcagacccttcaggatgggaggattgttcttttgacaacagaataaaagccatagaggaatgtaaatctgtaatagagagtaatcgaattagccgtgaaagttcagtggactgcttgaaggagtcaccaaacaagcagcaggagagagcccaaagccagagtggtgtggacttgcaggaagatgtgcttgtaagagagagacccagatccttggaggatctccatcagaaaaaagtaggccgggctaagagagaaagtaggagaatgagagaactagagcaagctatatttagcttagaattgctgaaagttcgttctcttggtggtatttctccttcagaggatcgcagatggtctacagaattggtgcctgaaggccttcagtctccacggggtacacctgatagtgagagctctcaaggaagcttggaacttctgagctatgaggaaagccaaaagagcaaactagagtctgtcatttcagatgaaggagacttgcagtttccatcacctaagatatccagcagtccaaaatttgattcacgggacaatgccctcagtgcctcaaatgagactagcagtgcagagcatttgaaggatggaactatgaaggaaatggtggtctgcagttctgagtctattacctgtaaaccacagctgaaagactccttcatttcaaatagtctacctacttttttttatatcccccaacaagacccactgaaaacaaattcccaactagacacaagtatccaaagaaacaaactattggaaaatgaagacacagcgggggaagctcttactttggatatcaacagggaaactagaaggtatcactgctcaggaaaagatcagattgttccttctttgaatacagagtcttctaatcctgtgcttaagaagttagaaaagctaaacactgagaaggaagaaaggcaaaaacagttgcagcaacagaatgaaaaagagatgatggaacagattcgccagcaaacagatattttagagaaggagcgcaaagccttcaagacaattgaaaagccaagaattggagagtgtttggtggcaccatcttcctatcagtcaaagcaaagagtagagaggccatcctctctcctcagcttaaatacctcaaataagggagaacttaatgtactggggtccctatcattaaaagatgcagctcttgcccaaaaagacagttcctctgctcacttacccccaaaggaccgacctgtcaccgtgttctttgaaagaaaaggaagtccatgccaatctagtactgtcaaggaattatccaagacagacagaatgggcacccagctgaatgtagcctgtaaactctcaaataatcgcatttcaaaaagagaacactttaggccaactcagtcttacagccacaattctgatgacctttccagagagggaaatgctaggcccattttcttcactccaaaggacaatatgagtattccccttgtcagcaaagaagccttaaacagtaaaaatcctcaactccataaagaagatgaaccagcatggaaacctgtgaagttagctgggccaggccaaagagagacatcacagcgattttcgtcagttgatgaacaagcaaaacttcataagactatgtctcaaggagagattaccaagttggcagtgagacagaaggcttcagattcagatataagacctcagagagctaagatgagattctgggccaaagggaaacaaggggagaagaagactaccagagtgaaacctactacccagtcagaggtttcgccactctttgcaggcacagatgtgattccagctcatcagtttccagatgaattagctgcatatcacccaacacctcctttgagcccagaactgcccggcagttgccggaaggaattcaaagagaacaaagaaccttctccaaaggctaagcgcaagcgaagtgtgaagattagcaacgtggctttggattctatgcattggcaaaatgactctgtccagatcatagcaagtgtcagtgatttaaaaagcatggatgaatttcttctgaaaaaggtgaatgacctagataatgaagacagcaagaaggatacactagtggatgttgtatttaaaaaagccctgaaggaatttcggcagaatatcttcagcttttattcatctgcattggcgatggatgatgggaaaagcatacggtataaagacctctatgcactatttgaacagattctggaaaagacgatgaggcttgagcagcgtgattcactgggtgaatctccagtgagagtttgggtcaacacttttaaagtgtttttagatgaatatatgaatgaattcaagacttcagattgcacagccacaaaggtgccaaaaacagaaagaaagaaaagaaggaaaaaggaaactgatttggtggaagaacacaatggtcacatctttaaagccacccaatatagcatccctacatactgtgaatactgttcttctttgatatggataatggaccgagcctctgtttgcaaattatgcaagtatgcttgccataagaagtgctgtctgaaaaccacagccaagtgctctaaaaagtatgatccagagctgtcatctcgacaatttggggttgaactgtcccgtttgaccagtgaagaccgaactgttcctttagtagtggaaaagctcataaactacattgaaatgcatggactgtatacagaaggtatttatcgaaagtctggttcgactaataaaatcaaggagcttcggcagggtctagatacagatgctgagagtgtaaatctagatgactataacatacacgtcattgcaagtgtattcaaacaatggcttcgagatttgcccaatcctctcatgacctttgaactctatgaggaatttcttcgagctatgggccttcaggagaggaaggagacaatccgtggtgtatactctgtgattgatcaactctcccgaactcatctcaatacactggaacgcctcatctttcatctagtcaggattgctctgcaggaagacactaatcgaatgtctgctaatgctttggccattgtgtttgcgccctgcattctccgctgccctgacaccactgacccactacaaagtgtacaggacatcagtaagactaccacttgtgtggaactgattgttgtggaacaaatgaataaatacaaggctcgtctcaaagatatcagtagcttggaatttgctgagaataaggcaaagaccaggttgtcactgattcgtagatcaatgggaaaggggcgtattcgtcgaggaaactatccaggtccatcgtctcctgttgtagttcggttgccttctgtgtctgatgtctcagaggagaccttgactagtgaggcagccatggagactgacatcacagaacagcagcaagcagctatgcagcaggaggagagagtactgactgagcagattgagaacctacagaaggagaaggaggagctaacatttgagatgcttgtactggaaccccgtgcctctgatgatgaaacccttgagtctgaggcctccattgggactgctgatagctcagagaatttgaatatggagtctgaatatgctatctctgagaaatcagaaagaagcttagcccttagctccctgaagacagctggcaagtctgaaccttccagcaagttgcgaaagcaacttaaaaagcagcaagactctttagatgtcgtggactcttcggtctcctctttatgtctgtctaacacggcatcatctcatgggaccagaaaactatttcagatttattccaaatctccattctaccgagctgcctcaggtaatgaggccctgggaatggaaggaccattgggccagaccaaattcctggaagacaagcctcagttcatcagcagaggaaccttcaacccggaaaagggcaaacaaaaattaaagaatgtgaaaaactcacctcagaaaaccaaagagaccccagaggggacagtcatgtctggccgcagaaaaactgtggacccagactgcacctccaaccaacagctagcactctttggaaataatgaatttatggtctgaaccggcagatgtgtgtccctccgtggctacagagtggtaaacaaatctcacctttggggctgcgtttcatcacctcgtccacaatagtcaatcctaattgtggtcctgcctcttttctaagcatatggctaagactgtatgtgctgaattcctgggcctcctgcagaagcagaaagcctgctggggatggtgccagctgtgccttggctgttgtatttgaattgagatttttactatacaaagccacctagggcctggggatttgggtcagttgtagttgcctctcccccaccctcttttcccttcccaaaggtgggtgttgaactaggggggatattgctgtcctgagggaccctctcatttctgacatttgaagaaaacgtataaatctttcttaaccgtgaaagcaaaagcctttgggtttattttgggatagttaggagctagggtagaatataatttttttccaaaaacttacttacaaacaaaaagcctaatccctctattttaagatttctgaaaaaacactccatgttatattctggggaaagcaaaaacaaaaaaaaaaaaaaaaaaaaaaaaaa

SEQ ID NO: 34 - protein, 2548 aa, Homo sapiens
  MISC_FEATURE (1)..(2548): myosin IXA MYO9A
MNINDGGRRRFEDNEHTLRIYPGAISEGTIYCPIPARKNSTAAEVIESLINKLHLDKTKCYVLAEVKEFGGEEWILNPTDCPVQRMMLWPRMALENRLSGEDYRFLLREKNLDGSIHYGSLQSWLRVTEERRRMMERGFLPQPQQKDFDDLCSLPDLNEKTLLENLRNRFKHEKIYTYVGSILIVINPFKFLPIYNPKYVKMYDNHQLGKLEPHIYAVADVAYHAMLQRKKNQCIVISGESGSGKTQSTNFLIHHLTALSQKGFASGVEQIILGAGPVLEAFGNAKTAHNNNSSRFGKFIQVNYQETGTVLGAYVEKYLLEKSRLVYQEHNERNYHVFYYLLAGASEDERSAFHLKQPEEYHYLNQITKKPLRQSWDDYCYDSEPDCFTVEGEDLRHDFERLQLAMEMVGFLPKTRRQIFSLLSAILHLGNICYKKKTYRDDSIDICNPEVLPIVSELLEVKEEMLFEALVTRKTVTVGEKLILPYKLAEAVTVRNSMAKSLYSALFDWIVFRINHALLNSKDLEHNTKTLSIGVLDIFGFEDYENNSFEQFCINFANERLQHYFNQHIFKLEQEEYRTEGISWHNIDYIDNTCCINLISKKPTGLLHLLDEESNFPQATNQTLLDKFKHQHEDNSYIEFPAVMEPAFIIKHYAGKVKYGVKDFREKNTDHMRPDIVALLRSSKNAFISGMIGIDPVAVFRWAILRAFFRAMVAFREAGKRNIHRKTGHDDTAPCAILKSMDSFSFLQHPVHQRSLEILQRCKEEKYSITRKNPRTPLSDLQGMNALNEKNQHDTFDIAWNGRTGIRQSRLSSGTSLLDKDGIFANSTSSKLLERAHGILTRNKNFKSKPALPKHLLEVNSLKHLTRLTLQDRITKSLLHLHKKKKPPSISAQFQASLSKLMETLGQAEPYFVKCIRSNAEKLPLRFSDVLVLRQLRYTGMLETVRIRQSGYSSKYSFQDFVSHFHVLLPRNIIPSKFNIQDFFRKINLNPDNYQVGKTMVFLKEQERQHLQDLLHQEVLRRIILLQRWFRVLLCRQHFLHLRQASVIIQRFWRNYLNQKQVRDAAVQKDAFVMASAAALLQASWRAHLERQRYLELRAAAIVIQQKWRDYYRRRHMAAICIQARWKAYRESKRYQEQRKKIILLQSTCRGFRARQRFKALKEQRLRETKPEVGLVNIKGYGSLEIQGSDPSGWEDCSFDNRIKAIEECKSVIESNRISRESSVDCLKESPNKQQERAQSQSGVDLQEDVLVRERPRSLEDLHQKKVGRAKRESRRMRELEQAIFSLELLKVRSLGGISPSEDRRWSTELVPEGLQSPRGTPDSESSQGSLELLSYEESQKSKLESVISDEGDLQFPSPKISSSPKFDSRDNALSASNETSSAEHLKDGTMKEMVVCSSESITCKPQLKDSFISNSLPTFFYIPQQDPLKTNSQLDTSIQRNKLLENEDTAGEALTLDINRETRRYHCSGKDQIVPSLNTESSNPVLKKLEKLNTEKEERQKQLQQQNEKEMMEQIRQQTDILEKERKAFKTIEKPRIGECLVAPSSYQSKQRVERPSSLLSLNTSNKGELNVLGSLSLKDAALAQKDSSSAHLPPKDRPVTVFFERKGSPCQSSTVKELSKTDRMGTQLNVACKLSNNRISKREHFRPTQSYSHNSDDLSREGNARPIFFTPKDNMSIPLVSKEALNSKNPQLHKEDEPAWKPVKLAGPGQRETSQRFSSVDEQAKLHKTMSQGEITKLAVRQKASDSDIRPQRAKMRFWAKGKQGEKKTTRVKPTTQSEVSPLFAGTDVIPAHQFPDELAAYHPTPPLSPELPGSCRKEFKENKEPSPKAKRKRSVKISNVALDSMHWQNDSVQIIASVSDLKSMDEFLLKKVNDLDNEDSKKDTLVDVVFKKALKEFRQNIFSFYSSALAMDDGKSIRYKDLYALFEQILEKTMRLEQRDSLGESPVRVWVNTFKVFLDEYMNEFKTSDCTATKVPKTERKKRRKKETDLVEEHNGHIFKATQYSIPTYCEYCSSLIWIMDRASVCKLCKYACHKKCCLKTTAKCSKKYDPELSSRQFGVELSRLTSEDRTVPLVVEKLINYIEMHGLYTEGIYRKSGSTNKIKELRQGLDTDAESVNLDDYNIHVIASVFKQWLRDLPNPLMTFELYEEFLRAMGLQERKETIRGVYSVIDQLSRTHLNTLERLIFHLVRIALQEDTNRMSANALAIVFAPCILRCPDTTDPLQSVQDISKTTTCVELIVVEQMNKYKARLKDISSLEFAENKAKTRLSLIRRSMGKGRIRRGNYPGPSSPVVVRLPSVSDVSEETLTSEAAMETDITEQQQAAMQQEERVLTEQIENLQKEKEELTFEMLVLEPRASDDETLESEASIGTADSSENLNMESEYAISEKSERSLALSSLKTAGKSEPSSKLRKQLKKQQDSLDVVDSSVSSLCLSNTASSHGTRKLFQIYSKSPFYRAASGNEALGMEGPLGQTKFLEDKPQFISRGTFNPEKGKQKLKNVKNSPQKTKETPEGTVMSGRRKTVDPDCTSNQQLALFGNNEFMV

SEQ ID NO: 35 - DNA, 7488 bp, Homo sapiens
  misc_feature (1)..(7488): myosin IXB MYO9B
atgagtgtgaaagaggcaggcagctcgggccgccgggagcaggcggcctaccacctgcacatctacccccagctgtccaccaccgagagccaggcctcgtgccgcgtgactgccaccaaggacagcaccacctcggacgtcatcaaggacgccattgccagcctgcggctggacggcaccaaatgttatgtgctggtggaggtcaaagagtcgggaggcgaggaatgggtgctggacgccaacgactcgcctgtgcaccgggtgctgctatggccccggcgggcacaggacgagcaccctcaggaggatggctactacttcctgctgcaggagcgcaacgcagatggaaccatcaagtacgtgcatatgcagctggtggcgcaggccacagccacccggcgcctagtggagcgtggcctcctgccacggcagcaggcggactttgatgacctgtgtaacctccccgagctaaccgagggcaacctcctgaagaacctcaagcaccgcttcctgcaacaaaagatctacacgtacgcggggagcatcctggtggccatcaacccctttaagttcctgcccatctacaaccccaagtacgtgaagatgtatgagaaccagcagctgggcaagctggagccacacgtcttcgcgctggccgacgtggcctactacaccatgctcaggaagcgcgtgaaccagtgcatcgtgatctcgggtgagagcggctccggcaagacccagagcaccaacttcctcatccactgcctcaccgccctcagccagaagggctacgccagcggcgtcgagaggaccatcctgggtgctggccctgtgctggaggcttttggaaatgccaagacagcccacaacaacaactccagccggtttgggaaattcatccaagtcagctacctagagagtggcatcgtgagaggagctgtcgtcgagaaatatctgcttgaaaagtctcgcctggtgtctcaggagaaggatgagaggaactaccatgtgttttattatttgttacttggggtcagcgaggaagagcgccaagaatttcagctcaagcagcctgaagattatttctacctcaaccagcataacttgaagattgaagatggggaggacctgaagcatgactttgagaggctcaagcaggccatggagatggtgggcttcctccccgccaccaagaagcagatttttgccgtcctctcggccatcctgtacctgggcaacgtcacttataagaagagagctacaggccgagaggaagggttggaggtcgggccacccgaggtgctggacaccctgtcgcagcttctgaaggtgaagcgagaaatcttggtggaggttctgaccaaaagaaaaacggtgaccgtcaacgacaagcttatccttccctacagcctcagcgaggccatcactgcccgcgactccatggccaagtctctgtacagcgccctgttcgactggattgtgctgcggatcaaccacgcactcctcaacaagaaggacgtggaagaggcagtctcgtgcctgtccattggggtcctggacatcttcgggtttgaagacttcgagaggaacagctttgagcagttctgcatcaactacgccaatgagcagctgcagtattacttcaaccagcacatcttcaagctggagcaggaggaatatcagggcgaggggatcacgtggcacaacatcggctacacagacaatgtcggctgcatccatctcatcagcaagaaacccacgggcctcttctacctgctggacgaggagagcaacttcccccacgccacgagccagaccctgctggccaagttcaaacagcaacatgaggacaataagtacttcctgggcaccccggtcatggagccagctttcatcatccagcacttcgcagggaaggtgaaatatcagatcaaggacttccgggagaagaacatggactacatgcggccagacatcgtggccctgctgcggggcagtgacagctcctacgtgcgggagctcatcggcatggaccccgtggccgtgttccgctgggccgtgctccgggctgctatccgggccatggcagtgcttcgggaggccggacgcctgcgggccgagagggccgaaaaggctgcaggtatgagcagccctggtgcccaaagtcacccagaagagctgccaagaggagccagcaccccttcggaaaaactttaccgcgatttgcataaccaaatgatcaagagcatcaaaggattgccctggcagggcgaggacccccgtagccttctccagtccctcagtcggctccagaaaccccgcgccttcatcctgaaaagtaaaggtatcaaacaaaagcagatcattccaaagaacctactggactccaagtccctgaaactcatcatcagcatgactctgcacgaccgcaccaccaagtccctactgcacctgcacaagaagaaaaagccaccaagcatcagcgcccagttccagacatcccttaacaagctcttggaggcactggggaaggcggagcccttctttatccgctgcatccgttccaatgctgaaaagaaagagctgtgctttgacgacgagctggtcctgcagcagctgcgctacaccggcatgctggagaccgtgcgcatccggaggtcagggtacagcgccaagtacacgttccaggatttcaccgagcagttccaggtgctcctgcccaaggatgcccagccctgcagggaggtcatctccaccctcctggagaaaatgaagatagacaagaggaactaccagatcgggaagaccaaggtcttcctgaaggagacggagcggcaagccctgcaggagacgctgcaccgggaggtggtgcggaaaatcctgctgctgcagagctggttccggatggtgctggagcgtcggcacttcctgcagatgaagcgggccgccgtcaccatccaggcctgctggcggtcctaccgggtccggagggcgctggagaggacgcaggctgccgtgtacctccaggcctcatggaggggctactggcagcggaagctctaccggcaccagaaacagagcatcatccgcctgcagagcctgtgtcgggggcacctgcagcgcaagagcttcagccagatgatctcggagaagcagaaggcagaagagaaggagagggaagccctggaagccgcaagagcaggtgctgaggagggcggacagggtcaggcggctggagggcagcaggtagctgagcaggggccggagccagcggaggatggcgggcacctggcatcggagcctgaggtgcagccaagtgacaggtcccccctagagcactcctcacctgagaaggaggccccaagcccagagaagactctcccaccccagaaaaccgtggcggctgaaagtcacgagaaagtccccagcagccgggagaagcgtgagtcgcgtcggcaaagagggctggagcacgtcaagttccagaacaaacacatccagtcctgcaaggaggagagtgccctcagagaaccttccagaagggtcacccaggagcaaggggtgagtctcctggaagacaaaaaggagagcagagaagatgaaacccttctagtcgtagagacggaggctgagaacacatctcaaaagcagcccacagagcaaccccaggccatggcagttggcaaggtctctgaagaaactgagaagacgctgcccagtgggagccccaggcctggccagttggagcggccgaccagcctggccctggacagcagggtcagcccaccggcccctggcagcgcccccgagacccccgaggacaagagcaaaccatgtggcagcccaagggttcaggaaaagcccgacagccccggaggctccacgcagatccagcggtacctggacgccgagcggctggccagcgccgtggaactgtggcggggcaagaagctggtggccgccgccagccctagtgccatgctcagccagtccctggacctcagcgacagacaccgggccacaggggccgccctcacgcccacagaggagaggcgcacctccttctccacgagcgacgtctccaagctcctcccgtccctggccaaggctcagcctgcagcagaaaccacggacggagagcgaagtgcgaaaaagccagctgtccagaagaagaagccaggcgacgcatcctccctcccagacgcagggctgtccccgggctctcaggtcgactctaaatccacgtttaagaggctttttctgcataaaaccaaggataaaaaatacagcctggagggcgcagaggagctggagaatgcagtgtccgggcacgtggtgctggaagccaccaccatgaagaagggcctggaagccccctccggacagcagcatcgccacgctgcaggtgagaagcgcaccaaggaaccaggaggcaaagggaagaagaaccgaaatgtcaagattgggaagatcacagtgtcagagaagtggcgggaatcggtgttccgccagatcaccaacgccaatgagctcaagtacctggacgagttcctgctcaacaagataaatgacctccgttcccagaagacgcccattgagagcttgtttatcgaagccaccgagaagttcaggagcaacatcaaaacgatgtactctgtcccgaacgggaagatccacgtgggctacaaggatctgatggagaactaccagatcgtcgtcagcaacctggccactgagcgtggccagaaggacaccaacctggtcctcaacctcttccagtcactgctagatgagttcacccgtggctacaccaagaacgacttcgagccagtgaagcagagcaaagctcagaagaagaagcggaagcaggagcgtgctgtccaggagcacaacgggcacgtgttcgccagctaccaggttagcatcccgcagtcgtgcgagcagtgcctctcctatatctggctcatggacaaggccctgctctgcagcgtgtgcaagatgacctgccacaagaagtgcgtgcacaagattcagagccactgctcctacacctacgggaggaagggcgagccaggcgttgagcctggccacttcggcgtgtgcgtagacagcctgaccagcgacaaggcctcggtgcccatcgtgctggagaagctcctggaacacgtggagatgcacggcctgtacaccgagggcctctaccgcaagtcgggtgctgccaaccgcactcgggagctccggcaggcgctgcagacagaccccgcagcagtcaagctggagaacttccccatccacgccatcacaggggtgctgaagcagtggctgcgggagctgcccgagcccctcatgaccttcgcacagtacggcgacttcctccgagccgtcgagctgccggagaagcaggagcagctggctgccatctatgccgtcctggagcaccttccagaagccaaccacaactccctggagagactcatcttccaccttgtcaaggtggccctgctcgaggatgtcaaccgcatgtcacctggggcgctggccattatcttcgcaccctgcctcctgcgctgccctgacaactcggacccgctgaccagcatgaaggacgtcctcaagatcaccacgtgcgtggagatgctgatcaaggagcagatgaggaaatacaaagtgaagatggaggagatcagccaactggaggctgcagagagtatcgccttccgcaggctttcgctcctgcgacaaaatgctccatggcctctcaaactggggttttcgtctccctatgagggggtcctgaacaagagccccaagacccgggacatccaggaggaggagctggaggtgctgctggaggaggaggcagccggcggcgatgaggaccgggaaaaggagattctcattgaacggatccagtccatcaaggaggagaaggaggacatcacctaccggctgccggagctggacccaaggggctcggacgaggagaacctggactcggagacgtcggccagcaccgagagcctgctggaggagcgggccgggcggggggcctcggaagggccccctgcgcctgctctcccttgccccggcgcgcccaccccgagccccctccccaccgtggccgcccctccacgacgaaggccgtcgtccttcgtaacggtcagagtgaagaccccccggcggacccccatcatgcccacggccaacatcaagctcccaccaggcctgccctcccacctgcctcgctgggcaccgggtgcccgggaggcggctgccccagtgcggcgccgggagccacctgcccgccgcccggaccagatacattccgtgtacatcacgcccggggcagacctgccagtgcagggcgccctggagcccctagaagaggatggccagccacctggggccaagcggaggtactcggatcccccaacgtactgcctgccccccgcctcgggccagaccaatggctgagagccacagctgacaaagtctgcatgtccgaggacggcccctgcactggagctgggcgccagagctgcagagctagtgttcggccctcagagaaggatccagaatcaaaagctcaagagtgacgtgaggtgggcaccggccccaagtgcagagtcaaggcagggagaggccggctggagccaggccccctcgcacgcagcccccaaatcatggacgcacctgtggggagcaccacatctccacctgcggcctcacatctccccactcccctttttgtacgtttaactgtttctttgtacgtggtttacgtaactttaaactgtaacagccttaatggaagaccaaatggttttttatatgtgtatgtacaaagttttctattaacgctgcccgtctcccttataacctggacgtgagctgtcagagcagaagccactaggccactgcgcgtctgaggctcagaccctgctgtggttggcttggggtggccaatgggctgggaccctccatgagagttttggacacttgggtcacctgacccgtgcctctctgacacatgtctccggggggcagccacctggccaatgtgcatttttgcacatgctggaaccttccatgggggtctgggctattggctggagccaggacatgagtcaggggcaccatggacctcacgtgccagggagacttgaatgtggctgtcactcttccggacgccaagggctgcaggaggctgcttttggcactacccaccccgtgtgacagaataggagccagcgactcaggactgctcacgggtcaggagggcaacgcctgaagtcagacctccctataggtcaacagggacaacctggggatctctggagcagggccctcctctctcaggcttggcccactcccccagacacctggacacgtggccacaaatctgggacaaggggcccccgcacagcatgaaataaaaagtgcctgagaagtgtgtgcaaaaaaaaaaaaaaaaaaaaaaaaaaaaaa

SEQ ID NO: 36 - protein, 2157 aa, Homo sapiens
  MISC_FEATURE (1)..(2157): myosin IXB MYO9B
MSVKEAGSSGRREQAAYHLHIYPQLSTTESQASCRVTATKDSTTSDVIKDAIASLRLDGTKCYVLVEVKESGGEEWVLDANDSPVHRVLLWPRRAQDEHPQEDGYYFLLQERNADGTIKYVHMQLVAQATATRRLVERGLLPRQQADFDDLCNLPELTEGNLLKNLKHRFLQQKIYTYAGSILVAINPFKFLPIYNPKYVKMYENQQLGKLEPHVFALADVAYYTMLRKRVNQCIVISGESGSGKTQSTNFLIHCLTALSQKGYASGVERTILGAGPVLEAFGNAKTAHNNNSSRFGKFIQVSYLESGIVRGAVVEKYLLEKSRLVSQEKDERNYHVFYYLLLGVSEEERQEFQLKQPEDYFYLNQHNLKIEDGEDLKHDFERLKQAMEMVGFLPATKKQIFAVLSAILYLGNVTYKKRATGREEGLEVGPPEVLDTLSQLLKVKREILVEVLTKRKTVTVNDKLILPYSLSEAITARDSMAKSLYSALFDWIVLRINHALLNKKDVEEAVSCLSIGVLDIFGFEDFERNSFEQFCINYANEQLQYYFNQHIFKLEQEEYQGEGITWHNIGYTDNVGCIHLISKKPTGLFYLLDEESNFPHATSQTLLAKFKQQHEDNKYFLGTPVMEPAFIIQHFAGKVKYQIKDFREKNMDYMRPDIVALLRGSDSSYVRELIGMDPVAVFRWAVLRAAIRAMAVLREAGRLRAERAEKAAGMSSPGAQSHPEELPRGASTPSEKLYRDLHNQMIKSIKGLPWQGEDPRSLLQSLSRLQKPRAFILKSKGIKQKQIIPKNLLDSKSLKLIISMTLHDRTTKSLLHLHKKKKPPSISAQFQTSLNKLLEALGKAEPFFIRCIRSNAEKKELCFDDELVLQQLRYTGMLETVRIRRSGYSAKYTFQDFTEQFQVLLPKDAQPCREVISTLLEKMKIDKRNYQIGKTKVFLKETERQALQETLHREVVRKILLLQSWFRMVLERRHFLQMKRAAVTIQACWRSYRVRRALERTQAAVYLQASWRGYWQRKLYRHQKQSIIRLQSLCRGHLQRKSFSQMISEKQKAEEKEREALEAARAGAEEGGQGQAAGGQQVAEQGPEPAEDGGHLASEPEVQPSDRSPLEHSSPEKEAPSPEKTLPPQKTVAAESHEKVPSSREKRESRRQRGLEHVKFQNKHIQSCKEESALREPSRRVTQEQGVSLLEDKKESREDETLLVVETEAENTSQKQPTEQPQAMAVGKVSEETEKTLPSGSPRPGQLERPTSLALDSRVSPPAPGSAPETPEDKSKPCGSPRVQEKPDSPGGSTQIQRYLDAERLASAVELWRGKKLVAAASPSAMLSQSLDLSDRHRATGAALTPTEERRTSFSTSDVSKLLPSLAKAQPAAETTDGERSAKKPAVQKKKPGDASSLPDAGLSPGSQVDSKSTFKRLFLHKTKDKKYSLEGAEELENAVSGHVVLEATTMKKGLEAPSGQQHRHAAGEKRTKEPGGKGKKNRNVKIGKITVSEKWRESVFRQITNANELKYLDEFLLNKINDLRSQKTPIESLFIEATEKFRSNIKTMYSVPNGKIHVGYKDLMENYQIVVSNLATERGQKDTNLVLNLFQSLLDEFTRGYTKNDFEPVKQSKAQKKKRKQERAVQEHNGHVFASYQVSIPQSCEQCLSYIWLMDKALLCSVCKMTCHKKCVHKIQSHCSYTYGRKGEPGVEPGHFGVCVDSLTSDKASVPIVLEKLLEHVEMHGLYTEGLYRKSGAANRTRELRQALQTDPAAVKLENFPIHAITGVLKQWLRELPEPLMTFAQYGDFLRAVELPEKQEQLAAIYAVLEHLPEANHNSLERLIFHLVKVALLEDVNRMSPGALAIIFAPCLLRCPDNSDPLTSMKDVLKITTCVEMLIKEQMRKYKVKMEEISQLEAAESIAFRRLSLLRQNAPWPLKLGFSSPYEGVLNKSPKTRDIQEEELEVLLEEEAAGGDEDREKEILIERIQSIKEEKEDITYRLPELDPRGSDEENLDSETSASTESLLEERAGRGASEGPPAPALPCPGAPTPSPLPTVAAPPRRRPSSFVTVRVKTPRRTPIMPTANIKLPPGLPSHLPRWAPGAREAAAPVRRREPPARRPDQIHSVYITPGADLPVQGALEPLEEDGQPPGAKRRYSDPPTYCLPPASGQTNG

SEQ ID NO: 37 - DNA, 9508 bp, Homo sapiens
  misc_feature (1)..(9508): myosin VB MYO5B
gtccggccgtagctgcgccgccgcggcgggagtaaaggtcgcgccgccgggagcgagccggccgcggcgcctgcgggaagccggcggggcaggtcggagaagagcgagaagatcgagaaactccaggccagcccgggaacatggcgccaggcgggccagccgcggactgagagccgcggggcagccaggagccggggcccgagccccgcccggcccgggccatgtcggtgggcgagctctacagccagtgcacaagggtctggatccctgaccctgatgaggtatggcgctcagctgagttaaccaaggactacaaagaaggagacaagagcctacagctcagactggaggatgaaacgattctggaatacccaattgatgtacaacgcaaccagctgcccttcttacggaatccagatatcttggtgggagaaaatgacctgactgcccttagctatcttcatgagcctgcagttttgcataatttgaaggtccgtttcctggagtccaaccatatctacacttactgtggtatcgtacttgttgccattaatccttatgaacagttgccaatctatggacaagatgtcatctatacctacagtggccaaaacatgggagacatggacccccacatctttgctgtggcagaagaagcctacaagcagatggccagagatgagaagaatcagtccatcatagtcagtggggagtctggagccgggaagacggtatcagccaagtatgccatgcgctatttcgccaccgttggtggctcggccagtgaaaccaacatcgaagagaaggtgctggcatccagtcccatcatggaggccattggaaatgccaagaccacccgcaatgacaacagcagccgttttggcaagtacatccagattggctttgacaaaaggtaccacatcatcggggccaacatgaggacttacctcttggagaagtccagagtggtcttccaggcagatgatgagaggaattaccacatcttttaccagctctgtgctgctgccggtcttccagaatttaaagagcttgcactaacaagtgcagaggactttttctatacatcacagggaggagacacttccatcgagggtgtggacgatgctgaggactttgagaagactcgacaagccttcacactcctcggagtgaaagagtcccatcagatgagcatttttaagataattgcttctatcttgcaccttggaagtgtggcgattcaggctgagcgtgatggtgattcctgtagtatatcaccccaggatgtatacctaagcaacttctgccgactgctaggggtggagcacagtcagatggagcactggctgtgtcatcgcaagctggtcaccacctcggagacctacgtcaagaccatgtccctgcagcaggtgatcaatgcgcgcaacgccctggcgaagcacatctatgcccagttgttcggctggattgtggagcacatcaacaaggccctgcacacctccctcaagcagcactccttcatcggggtcctggacatctatgggtttgagacatttgaggtaaacagctttgagcagttctgtatcaactatgcaaatgaaaagctccagcagcagttcaactcgcatgttttcaaactggagcaagaagaatacatgaaggaacagatcccttggaccctgattgatttttatgataaccaaccttgtatcgacctcattgaagccaagctgggtatcttggacctgttggatgaagaatgtaaggtccccaaaggaactgaccagaactgggctcagaagctctatgaccggcactccagcagccagcacttccagaagccccgcatgtccaacacggccttcatcatcgtccactttgcagacaaggtggagtacctctctgatggttttctggagaaaaacagagacacggtgtatgaagagcagatcaatatcctgaaggccagcaagttcccactagtggctgacttgtttcatgatgacaaggaccctgttcctgccaccacccctgggaaggggtcatcttcgaagatcagcgtccgttctgccagaccccccatgaaagtctccaacaaggagcacaagaaaaccgttggccaccagttccgtacctccctgcatctgctcatggagaccctgaatgccacgacacctcactatgtccgctgcatcaagcccaacgatgagaagctcccctttcactttgacccaaagagagcagtgcagcaactcagagcctgcggggtgttggagacgattcgaatcagtgcagctggctacccatccaggtgggcctaccatgactttttcaaccggtatcgggtgctggtcaagaagagagagctcgccaacacagacaaaaaggccatctgcaggtctgtcctggagaacctcatcaaggaccccgacaagttccagtttggccgcaccaagatcttctttcgagcaggccaggtggcctacctggagaagctgcgggctgacaagttccggacagccaccatcatgatccagaaaactgtccggggatggctgcagaaggtgaaatatcacaggctgaagggggctaccttaaccctgcagaggtactgccggggacacctggcccgcaggctggctgagcacctgcggaggatcagagcggctgtggtgctccagaaacattaccgcatgcagagggcccgccaggcctaccagagggtccgcagagctgccgttgttatccaggccttcacccgggccatgtttgtgcggagaacctaccgccaggtcctcatggagcacaaggccaccaccatccagaagcacgtgcggggctggatggcacgcaggcacttccagcggctgcgggatgcagccattgtcatccagtgtgccttccggatgctcaaggccaggcgggagctgaaggccctcaggattgaggcccgctcagcagagcatctgaaacgtctcaacgtgggcatggagaacaaggtggtccagctgcagcggaagatcgatgagcagaacaaagagttcaagacactttcagagcagttgtccgtgaccacctcaacatacaccatggaggtagagcggctgaagaaggagctggtgcactaccagcagagcccaggtgaggacaccagcctcaggctgcaggaggaggtggagagcctgcgcacagagctgcagagggcccactcggagcgcaagatcttggaggacgcccacagcagggagaaagatgagctgaggaagcgagttgcagacctggagcaagaaaatgctctcttgaaagatgagaaagaacagctcaacaaccaaatcctgtgccagtctaaagatgaatttgcccagaactctgtgaaggaaaatctcatgaagaaagaactggaggaggagcgatcccggtaccagaaccttgtgaaggaatattcacagttggagcagagatacgacaaccttcgggatgaaatgaccatcataaagcaaactccaggtcataggcggaacccatcaaaccaaagtagcttagaatctgactccaattacccctccatctccacatctgagatcggagacactgaggatgccctccagcaggtggaggaaattggcctggagaaggcagccatggacatgacggtcttcctgaagctgcagaagagagtacgggagctggagcaggagaggaaaaagctgcaagtgcagctggagaagagagaacagcaggacagcaagaaagtccaggcggaaccaccacagactgacatagatttggacccgaatgcagatctggcctacaatagtctgaagaggcaagagctggagtcagagaacaaaaagctgaagaatgacctgaatgagctgaggaaagccgtggccgaccaagccacgcagaataactccagccacggctccccagatagctacagcctcctgctgaaccagctcaagctggcccacgaggagctcgaggtgcgcaaggaggaggtgctcatcctcaggacccagatcgtgagcgccgaccagcggcgactcgccggcaggaacgcggagccgaacattaatgccagatcaagttggcctaacagtgaaaagcatgttgaccaggaggatgccattgaggcctatcacggggtctgccagacaaacagcaagactgaggattggggatatttaaatgaagatggagaactcggcttggcctaccaaggcctaaagcaagttgccaggctgctggaggctcagctgcaggcccagagcctggagcatgaggaggaggtggagcatctcaaggctcagctcgaggccctgaaggaggagatggacaaacagcagcagaccttctgccagacgctactgctctccccagaggcccaggtggaattcggcgttcagcaggaaatatcccggctgaccaacgagaatctggaccttaaagaactggtagaaaagctggaaaagaatgagaggaagctcaaaaagcaactgaagatttacatgaagaaagcccaggacctagaagctgcccaggcattggcccagagtgagaggaagcgccatgagctcaacaggcaggtcacggtccagcggaaagagaaggatttccagggcatgctggagtaccacaaagaggacgaggccctcctcatccggaacctggtgacagacttgaagccccagatgctgtcgggcacagtgccctgtctccccgcctacatcctctacatgtgcatccggcacgcggactacaccaacgacgatctcaaggtgcactccctgctgacctccaccatcaacggcattaagaaagtcctgaaaaagcacaatgatgactttgagatgacgtcattctggttatccaacacctgccgccttcttcactgtctgaagcagtacagcggggatgagggcttcatgactcagaacactgcaaagcagaatgaacactgtcttaagaattttgacctcaccgaataccgtcaggtgctgagtgacctttccattcagatctaccagcagctcattaaaattgccgagggcgtgttacagccgatgatagtttctgccatgttggaaaatgagagcattcagggtctatctggtgtgaagcccaccggctaccggaagcgctcctccagcatggcagatggggataactcatactgcctggaagctatcatccgccagatgaatgcctttcatacagtcatgtgtgaccagggcttggaccctgagatcatcctgcaggtattcaaacagctcttctacatgatcaacgcagtgactcttaacaacctgctcttgcggaaggacgtctgctcttggagcacaggcatgcaactcaggtacaatataagtcagcttgaggagtggcttcggggaagaaaccttcaccagagtggagcagttcagaccatggaacctctgatccaagcagcccagctcctgcaattaaagaagaaaacccaggaggacgcagaggctatctgctccctgtgtacctccctcagcacccagcagattgtcaaaattttaaacctttatactcccctgaatgaatttgaagaacgggtaacagtggcctttatacgaacaatccaggcacaactacaagagcggaatgaccctcagcaactgctattagatgccaagcacatgtttcctgttttgtttccatttaatccatcttctctaaccatggactcaatccacatcccagcgtgtctcaatctggaattcctcaatgaagtctgaagatgcatgtttccagcattagtttgattcccaatgtgagcaagaaggaagtatatacagtaaagtaaattcaaggatctgttaaatctggtaaaagtagatcaaatcagagattgacagcctgtggagggtgctgaactatacagaattagacacaactatgtcattattttttgtacctactgctcagaataaaaacacttgaaatatggaagattttaagtttgatttcagtccaacacatatacataatttatagacaccaagcagtccccatagacatataaaaggtgtcaattctataaaacgaagctgcctagttttgatctttgcatagaactagagaatgtccaaattaaaataccaaatatatataagtcacataaattgccttcaaagggctttaacaaataatggtactaataaccatgataatggcatatactgacatttcccaaagtttgcaaaccataggtgtggttgagtttgtggtgagatgttttaagaacaaaaatatggggatgagacttctgagaaatattcccaaaatattttttaatggctgattatacacagacagtggtgtaactgacctccagaccagacattttgagtactggtttctgaagcaaaattagaagtgccagtcctcagtgtgctcaaacgcttttgtgttatcttgatttaatggaagagattattaaaatgctgctatcccaaactccaagtgagaaagatggaaaaatattttgtttctgatgctagtccatacactttccaagtcccacaaaactttcacaaaaatgtatataagctaaatattagaaacggataacaaacttgttttatttatagatgtaaaaaccaaacaagtcaatatgaaagcttttaatctcttaataccattaagcttccagtaagagcatcacataatgctctactgttccagaaaccaaatagtaaaacaaactaaagttcgcacatcagatcatctgaaaaaccttcaaaaataatcagttcagggatattatacaaaagtttgggttttttttttttaagagaataaaatggcttaggtcaactttcccttttcaggttattttcaacgtttttcaaatttagcacacaaaaaattgtaaatatctctcccacaaaataaggattttaaaaaagtaattcagtaatataacaggcttagatgtttgctgctcttagaattttttttaacttgtttttggtttcttcaaaagcaagcattcaattggaaacccatattctttccacacttttttttactgtcttttctgtatttcttgatagcagtatgctgttcccataagaaaaaaatggtatttgcaaatcatggaagaacagcctctgtattacattgagaaaataagatttatccatgaattggaagtagaacagcctgccttcaccctcttttactcaaccacccaacttaaaaggctcttggaaacacagcacactccacgctaccttctgcactgtgcccttagagcacagcttcctcagttgttctctgcatctcctggggcttaggccagtcttagcctgggttaaggctgctgacattgtgttccaatcagttgtcatgggcattatcccctctacatccacattaaacatgccggcttctcttgggcatcggcagagctgtgcctttttctttcagttacagttacataatcactgacgtccatgacacttacccatggatccatgtgctgacttcatttagaaggccaatctaaaacaactgggtttgtggctacctctttaaagttgtttgtgaaggataatttgttttttaatgcactttagtttgaaagtgagtctcttatgtaaggaccatccttaaaagaccaaaaatgccttgttagagtgttaaggagttttgacatgcagtggttccacaaacacagtggcttactatccttatacactgtcttataccatcattctctccatctctcttggtcactactctctgctgtcactggttaatcactaggtgccaagagcttactgaataaaagcttggcaattagaataaatggggagggaaggaccttatgaatagtccatttagcctaagaaatggcagatttagttcttctcttccaaaagataaaggtatatcctggaattgtacttaaaacttacagatgactaacaaatatatactttatatgtagttaatatttagatctgtcttatttaatacttggaggctagaagaagcatctttaggggaactatataatcttttgttagcattttctctgcattttaaaaaatcatttcaattcaaacatttatcagtgtcatgaaatcagtaatgactctttaacaattcaggtttgaactctgcattagatgtctctttaattttttaatatttaaaatttagttgacatttttttcaccaggtgcctttagcggttactaagataactgacatcagttgtttctctgaaataagtgttgctgtgggaataattttaatgttcaaggtgatatcatgggggagttttgtcttttaaaacattagaagcattttaaatattaagaatcaaatatttatagatcaaaacttgtgttttaagtattatacgggacctgtttacttatagtaaatgtgaatgtacacatgagttgttgctgaagctgacaagcatattacatacatgcattttccctgtgccctcatagttgcagttagagttccagtacctgtaggctcacctgggaggcagattagacccaaaggtagatgtttttcccctttccatgaagcatgtcagtgggagttgcttcctttgatttccctagtactaaattttaaggcttttgtaaaaacaaaacaaaactaggagcttggaacagttaaaaatcaacactgctaccatcaattcatcaaatatttacttagagctttcatacattaagattccagtaaccaataaattagaattcatttcttctgcataaagtaaattttcatacacttgacctactaagacagcaagggtgtcctaaattgaggcatttgtataatgcctgcataactaaatggtcactaaaatgggacagcatggggcaagaccttgtagttcttcacagaatatttgtggtcagtttctccaattaatttgctgcatgagccaaataaccataattcactttttatacccactggtgccataattagagaattagagggtgtagacagaggttaatgccaatgagaaacacaggacagggttttttttattataaaggtcattagatacaaaagattgtttttcaaaaaatttctaattctaacaaaggggatcaatcagaaatgaaactaagctactttctaaagtgacactgtatcagaataatccagatttgaatataacattttgccaccaactgacatttagatgaaggactgcctctctgaaagagttcagatcatattcaggggtgaatccaacaccatggaagaaagactactgatgaaaatattttcccactttgcacaaatctgtaaactacacctttgtttatagaaaaatgcttgtaatagtcactgtaatatttagctgtggataaaaatttgtggaaataaatacttttgaataaagaggtgtgccaaatctaaatgaaatttaaaactctgcagctacaggttgacaaagtttctttgtaatgctctcttgagaagc

SEQ ID NO: 38 - protein, 1848 aa, Homo sapiens
  MISC_FEATURE (1)..(1848): myosin VB MYO5B
MSVGELYSQCTRVWIPDPDEVWRSAELTKDYKEGDKSLQLRLEDETILEYPIDVQRNQLPFLRNPDILVGENDLTALSYLHEPAVLHNLKVRFLESNHIYTYCGIVLVAINPYEQLPIYGQDVIYTYSGQNMGDMDPHIFAVAEEAYKQMARDEKNQSIIVSGESGAGKTVSAKYAMRYFATVGGSASETNIEEKVLASSPIMEAIGNAKTTRNDNSSRFGKYIQIGFDKRYHIIGANMRTYLLEKSRVVFQADDERNYHIFYQLCAAAGLPEFKELALTSAEDFFYTSQGGDTSIEGVDDAEDFEKTRQAFTLLGVKESHQMSIFKIIASILHLGSVAIQAERDGDSCSISPQDVYLSNFCRLLGVEHSQMEHWLCHRKLVTTSETYVKTMSLQQVINARNALAKHIYAQLFGWIVEHINKALHTSLKQHSFIGVLDIYGFETFEVNSFEQFCINYANEKLQQQFNSHVFKLEQEEYMKEQIPWTLIDFYDNQPCIDLIEAKLGILDLLDEECKVPKGTDQNWAQKLYDRHSSSQHFQKPRMSNTAFIIVHFADKVEYLSDGFLEKNRDTVYEEQINILKASKFPLVADLFHDDKDPVPATTPGKGSSSKISVRSARPPMKVSNKEHKKTVGHQFRTSLHLLMETLNATTPHYVRCIKPNDEKLPFHFDPKRAVQQLRACGVLETIRISAAGYPSRWAYHDFFNRYRVLVKKRELANTDKKAICRSVLENLIKDPDKFQFGRTKIFFRAGQVAYLEKLRADKFRTATIMIQKTVRGWLQKVKYHRLKGATLTLQRYCRGHLARRLAEHLRRIRAAVVLQKHYRMQRARQAYQRVRRAAVVIQAFTRAMFVRRTYRQVLMEHKATTIQKHVRGWMARRHFQRLRDAAIVIQCAFRMLKARRELKALRIEARSAEHLKRLNVGMENKVVQLQRKIDEQNKEFKTLSEQLSVTTSTYTMEVERLKKELVHYQQSPGEDTSLRLQEEVESLRTELQRAHSERKILEDAHSREKDELRKRVADLEQENALLKDEKEQLNNQILCQSKDEFAQNSVKENLMKKELEEERSRYQNLVKEYSQLEQRYDNLRDEMTIIKQTPGHRRNPSNQSSLESDSNYPSISTSEIGDTEDALQQVEEIGLEKAAMDMTVFLKLQKRVRELEQERKKLQVQLEKREQQDSKKVQAEPPQTDIDLDPNADLAYNSLKRQELESENKKLKNDLNELRKAVADQATQNNSSHGSPDSYSLLLNQLKLAHEELEVRKEEVLILRTQIVSADQRRLAGRNAEPNINARSSWPNSEKHVDQEDAIEAYHGVCQTNSKTEDWGYLNEDGELGLAYQGLKQVARLLEAQLQAQSLEHEEEVEHLKAQLEALKEEMDKQQQTFCQTLLLSPEAQVEFGVQQEISRLTNENLDLKELVEKLEKNERKLKKQLKIYMKKAQDLEAAQALAQSERKRHELNRQVTVQRKEKDFQGMLEYHKEDEALLIRNLVTDLKPQMLSGTVPCLPAYILYMCIRHADYTNDDLKVHSLLTSTINGIKKVLKKHNDDFEMTSFWLSNTCRLLHCLKQYSGDEGFMTQNTAKQNEHCLKNFDLTEYRQVLSDLSIQIYQQLIKIAEGVLQPMIVSAMLENESIQGLSGVKPTGYRKRSSSMADGDNSYCLEAIIRQMNAFHTVMCDQGLDPEIILQVFKQLFYMINAVTLNNLLLRKDVCSWSTGMQLRYNISQLEEWLRGRNLHQSGAVQTMEPLIQAAQLLQLKKKTQEDAEAICSLCTSLSTQQIVKILNLYTPLNEFEERVTVAFIRTIQAQLQERNDPQQLLLDAKHMFPVLFPFNPSSLTMDSIHIPACLNLEFLNEV

SEQ ID NO: 39 - DNA, 8662 bp, Homo sapiens
  misc_feature (1)..(8662): myosin VI MYO6
gtgcacgccgcagtgccggggactcggcggggcgccggccggcgggcggagaccgactcgggatctgtccgagcaggaagccagcctcagcccggccgctgtcgccgccctgtcctggtgcccgtccgcgtcgtcgccctcttcactggccctcatcacttctcaccgcgccctccagcttcacccgtacaggtagccccgccgccgcgcacctgccttcgctcccgcaccggtgacagtggatagtggaaacaggagatcgtggatcctccttcaaaaatggaggatggaaagcccgtttgggcgccacaccctacagatggatttcagatgggcaatattgtggatattggccccgacagcttaacaattgaacccttgaatcagaaaggcaagacatttttggctctcataaaccaagtgtttcctgcagaagaggacagtaaaaaagatgtggaagataactgttcactaatgtatttaaatgaagccacactgctccataatatcaaagttcgatatagtaaagacagaatttatacatatgtcgccaacattctgattgcagtgaatccatactttgacatacctaaaatatattcttcagaagcaataaagtcatatcaaggaaaatctcttgggacaagaccacctcatgtctttgcaattgctgataaagcttttcgagacatgaaggtgctcaagatgagtcagtctatcattgtatctggagaatcaggagccggcaaaacagaaaatacaaaatttgttctaagatacctgactgaatcctatggaacaggtcaagatattgatgacagaattgttgaagctaacccactcctagaagcctttggaaatgcgaagactgttcgcaacaataatagcagtcgatttgggaaatttgtagaaatacattttaatgaaaagagctcagttgttggaggatttgtttcacattatctcctagagaaatctaggatctgtgttcaaggcaaagaggaaagaaattatcatatcttttataggttgtgtgctggtgcttctgaagatattagagaaaaacttcatttgagttcaccagataattttcggtatttaaaccgaggctgcactagatactttgctaacaaagaaactgacaaacagattttacagaaccgcaaaagtcctgagtaccttaaggcaggttctatgaaagatcctctgctagatgaccatggtgattttattagaatgtgcacggctatgaaaaaaattggtttggatgatgaagaaaagcttgatctcttccgggtagtagctggcgtcctgcaccttggaaatattgattttgaggaagctggcagcacttcaggtggttgtaatctgaagaataaatctgctcagtctttggaatattgtgctgaattactgggtttggaccaagatgatcttcgagtaagtttgaccacaagagtcatgctaacaacagcagggggcaccaaaggaacagttataaaggtacctctgaaagtggagcaagcaaacaatgctcgtgatgccctggcaaagacagtgtatagccatctttttgatcatgtggtaaacagagtaaatcagtgttttccttttgaaacatcatcctattttattggagtcctagatattgctggttttgagtactttgagcataacagttttgaacaattttgcatcaactattgcaatgaaaaacttcaacaattttttaatgaaaggattctgaaggaggaacaagaactctatcaaaaagaaggtttaggtgttaatgaagtgcattatgtggataatcaggactgtatagatttaattgaagccaaattagtgggaatactggatattttggatgaagaaaatcgccttccccagccaagtgatcaacactttacatctgcagttcaccaaaagcacaaggatcattttcgactcactattcccagaaaatctaagctggcagttcataggaatatcagagacgacgaaggcttcattatcaggcattttgcgggggcagtgtgctatgaaacaacccagtttgtggagaaaaataatgatgctttacatatgtctcttgaatccttaatatgtgaatccagagataagtttatacgggaattatttgaatcatccacaaataacaacaaagatactaaacaaaaagcaggaaaacttagcttcatcagcgtgggaaacaagtttaagacacagttaaatttgcttctggataaacttcgaagtactggagcaagctttattcgttgcatcaaacctaacttaaagatgacaagccaccactttgaaggtgctcaaattctgtctcagcttcagtgttcagggatggtgtctgttttggacttgatgcagggtggttacccatcacgagcttcatttcatgaactctacaacatgtacaaaaagtatatgccagataaacttgcaagattggatccaagactattttgtaaggctttgtttaaagctttgggcttaaatgaaaatgactacaagtttgggttaaccaaagtattttttagacctggcaagtttgcagaatttgatcagatcatgaagtctgaccctgaccacttagcagagttggttaaaagagtcaatcactggctcacatgcagtcgctggaagaaagttcagtggtgctcactctcagtcatcaaattgaaaaacaaaataaaatatcgagctgaagcctgcattaaaatgcaaaaaactattcgaatgtggctttgcaagaggagacacaaacctcgcattgatggtctggttaaggtgggcacactgaaaaaacgacttgataaatttaatgaggtagtcagtgtgttgaaagatggaaaacccgagatgaataaacagatcaagaatctggaaatttctattgatactttgatggccaaaattaagtccactatgatgacgcaggaacaaatccagaaagaatatgatgcactggttaaaagctcagaggaactcctcagtgcattacagaaaaaaaaacagcaggaagaggaagcagaaaggctgaggcgtattcaagaagaaatggaaaaggaaagaaaaagacgtgaagaagacgaaaaacgtcgaagaaaggaagaggaggaaaggcggatgaaacttgagatggaagcaaagagaaaacaagaagaagaagagagaaagaaaagggaagatgatgaaaaacgcattcaagctgaagtggaggcacagctggcccgacagaaggaggaggaatcccaacagcaagcagttctggagcaggagcgcagggaccgggagctggccctgaggattgcccagagtgaagccgagctcatcagtgatgaggcccaggccgacctggcgctgcggagaaatgatggaacaagacccaaaatgacaccggaacaaatggccaaagaaatgtcagaatttttgagtagaggtcctgctgtactagccaccaaagcagctgctggtactaagaaatatgatcttagtaaatggaaatatgcagaactacgtgataccatcaatacttcttgtgatattgagctcctggcagcttgcagagaagaatttcataggagactaaaagtgtatcatgcttggaaatctaagaacaagaagagaaatactgaaacagagcaacgtgctccaaagtctgttactgattatgattttgcaccatttttgaacaattcacctcagcaaaacccagcagctcagattcctgccaggcagcgggagattgaaatgaaccgacagcaacgcttcttccgcatcccattcatccgccctgccgaccagtacaaagaccctcagagtaagaaaaaaggctggtggtatgcccattttgatggaccatggattgcccggcaaatggaactccatcctgacaagccacccatcctacttgtggctggtaaggacgacatggagatgtgtgagctgaatcttgaggagactggcctgactcggaagcgtggtgctgagatcttgccaagacagtttgaagaaatctgggaacgctgtggaggcatccagtaccttcagaatgcgattgagagcagacaggctcggcccacctatgcaacagccatgctgcagagtctgttaaagtagatgttgcacaccagccttacagctgggagcctttgccatggtacttaggtagggtgtgtgcccccagatttaaccattccataatcatgttagagttacttctataaagtgaacagattttattaatcacggcttttggtgaatttgtttaaggttaattatggtagcaaattttggacctaaacattatttttctgtatcccgctgtaattcccaaaactctcattattctctaactattacacatgggcatattctgatgtttctcatcctttgccagaagactaccttacatccatcgtaattgttctctaggaaaagagaacttttttcaaaattcaaaatactttttaaggatggcacagtaccatataactggagtaataaaacatgagcttacattcttacaataactaaaccacttaaaatgatcaaggcactaatgttttggtctgaaaagctgtgtactttatagacattttcagacatttttggaaatttccattaaaggtggaaaatctatttttttcctcctttgcagtgtcttagtttgaatgaaacacttcgaagttctagaattctagaaagagccttaatgtatttgatgtattctgtgataagaggtactaatagtatccagcacagatttgcttttctttgctagcacaatgtgtgttgctgtcagaatattctttttatattctgtggaaaaataaaggaaattcagattgtttaaatgcctaaaagttttgagataagttttgtttcaattagaaaaggaaataggttttaggtggcatagtggcttaactggactgaattcaaatattctttcaacttcatctcaatagtgatttttgtatcagaatcttgtccaagttgtttcattgatttagtaagtgttctgcttccaacatctttctttttaagaaattcctagtgtcttttttggcctttgaggttttggtaattgtagacctgtttcataagctttgtaattcagaaatccttgtatttagtaagtgcttgttttacataactgataattttaaaatgttttctttgtgtgctgttagtattgattcaaatgtcagcagctttaagcctaatatttatgactttcacatttggaatttaaagacaaaaatacatcaaggagttatgctgacataattctaaggagttttgttgtattttagaataaaattataaagtaaaatgattctctgtactgctttttcccccagtttttagagaccctaacctttgaaatgaaattccagtgatttcttttttccctagaaagattacctcagttagggaagtatttcccagctgactagtgtttgtgagccacagacactgtcttcagaattgcttctctcatgtcttagtagagaaatatttatttattatgatacattcaaatgattgtcaagttaaattaaatggttgtgtctgtgctattgagaatgcaaatgtgattatcttttgaaggctgtattactgcatagcttcacccaccctcgggtcatttcgtccctgtgattggggacagaaggtgtagctactgaagtaaatgacctattctctctcttccatctctcgcctttaactggtgtttttatttgtgtaggatagtgaatgataagcttttttcctaaccagtagtgagtaaagttcttgaacaaaatttagtagccaaattgttttttaatgacatgtctctttagtacaatagttttgtgtatcttttagatacattaataggcactagatggaaaattaaagagttaaacatatttaaatgagagaatctaatgtttcagaaatttgtaagaaatgtatcacagcaaagggttgttataagtccttagtttttgactctaatagttaatacaattatagttaatcttaagccataatgtttctaatcatgtcacacagctgtcctagaacttatctatttaaaatagtttcctgagttaattttggccagcagggcaactgccctaattcagatagatttacagtaacctacgtacagtagatgcacatacacacagacacccctttgctggagaaacttaggaccctgtcagccttttaaaggaaacagcaggagtggtgtcctaaatgatgttcatgcagctgctttaccatgttcacagtcaagcccatgcatgccaggttaaaactgtggaaatcaaaagtaaattcactcatattttaatcattttaactgagatttaaaattagaagtttaaaccactatatataaagaactaatcttttcttaataccagttctttccatagcatatgctttgcaaaggcagcatgcataaaatatttaaaatgagaggacagaatgttttcacatttgattcaattttaatataattcctaattgtggtaacacagttgagatatgtattatgagttatgggaactaattgagaaaaggaagttactctaatccacgtatgttaagagaatattgagttttcttagttgtaaagttggggagatggcaccttctcagaggattgtgaaaatatgaggaagaaacaaaacagtgcatgtaggagcacagggccacacaaaggcattctattgttatgctcattctgcttctgtaatgacttttcataggtcattcttgtgaaccattttgttttgcaagcaaccaaggaaagaacatcttaagtggaaaatcagtggtggttgtgaacacttagagaatagcaatccacaggcaagaataatggtattgtttgtagagctttattaattggatattttttaaaagacattttcattcacaggtcattactatggttctcagcgatccaaatatgtagatcattggtttttttttttacctgaagtagcttaagagtacttggatcagtagaataaatatttattgaatcaatcagtcagccaattaatatgatgttagtgatagacctgcctccttttatggaagaggtaacagatccagagaggtcaagtaatttagttgtagactgaaaaatatatcaaagcctttgctgcaatcatatgtaacaaaaagaaccaaaacaaacactttttagtggcacctgtggatttacaaagggttgcctctctgtcattccacaacttcagaaggtgtgacaggttttccctatttatcattaccaataataacaagtattgagagttttaaaatttctcccagaagataaactaacaaggatggaaggggagggcaaaggatatctaaacatgagaataaggacatgttagagggggggaaacagttgtaacaataaggaaagagaagagcaacagtggaagagacaggttgtgtgcccctaaagattctgcacccccagtttggaaacactgatacattttaggacacagagcactcctagatctctacgaaattttagaatgaataatgtgtaatttataggatcagaacgtatggttattaaaacttggatcaagatatgcccggtgtatacattcttagcacataggaatggcactgccatactggagaaggtcagcagtaaataggcattctgtacataagcctcatggaagggtaagatggagagactggcagaagtagcacctactctgctgggagcacttctctgagtacgctttagttcaattcaaatcactgtattctttccccattgctaacctaatatatgaaacaagcttagctgtctcagaagtttttcaagagatgatcaggaaaaattaatgcacattcaaaaggagaatcttcagtacaaatttgtttttttaaaaatagatttagggctgggcgcggtggctcacgcctgtaatcccagcactttgggaggccgaggcgggtggatcacgaggtcaagacttcgagaccagcctggccaacatggtgaaaccctgtctctactaaaaatacaaaacattagccaggcgtggtagtgggtgcctgtaatccctgctacttgggaggctgaggcaggagaatcacttgaacgcgggaggcagaggttgcagggagccgagatggcgccattgcactccatcctgggcaacaagagcgaaattccatctcaaaaaataaaatagatttagggggtacaagtgcagttttgttacatgggtatattgcatagtggtaaaatgtgggcttttagtgtacctaacacccagagaagcatacattgtgcccagtaggtaatttttcatccctaaaccttttctcagcctcccactttctggagtctccaatgtcggttattccactctttatgtccatatctacacattcaatcctaatttgtaccaagtagcatctcacctttaaatcacaggcttattagttgggtgttttctttttacttatgaaaattcatctagtcaaactgtcaattaatttttcctcatttcattaaaagtgtatatctaatgctttctctaaaaattgatgtactggaaatacaaataaataaatgctccctgtgtagaatttc

SEQ ID NO: 40 - protein, 1285 aa, Homo sapiens
  MISC_FEATURE (1)..(1285): myosin VI MYO6
MEDGKPVWAPHPTDGFQMGNIVDIGPDSLTIEPLNQKGKTFLALINQVFPAEEDSKKDVEDNCSLMYLNEATLLHNIKVRYSKDRIYTYVANILIAVNPYFDIPKIYSSEAIKSYQGKSLGTRPPHVFAIADKAFRDMKVLKMSQSIIVSGESGAGKTENTKFVLRYLTESYGTGQDIDDRIVEANPLLEAFGNAKTVRNNNSSRFGKFVEIHFNEKSSVVGGFVSHYLLEKSRICVQGKEERNYHIFYRLCAGASEDIREKLHLSSPDNFRYLNRGCTRYFANKETDKQILQNRKSPEYLKAGSMKDPLLDDHGDFIRMCTAMKKIGLDDEEKLDLFRVVAGVLHLGNIDFEEAGSTSGGCNLKNKSAQSLEYCAELLGLDQDDLRVSLTTRVMLTTAGGTKGTVIKVPLKVEQANNARDALAKTVYSHLFDHVVNRVNQCFPFETSSYFIGVLDIAGFEYFEHNSFEQFCINYCNEKLQQFFNERILKEEQELYQKEGLGVNEVHYVDNQDCIDLIEAKLVGILDILDEENRLPQPSDQHFTSAVHQKHKDHFRLTIPRKSKLAVHRNIRDDEGFIIRHFAGAVCYETTQFVEKNNDALHMSLESLICESRDKFIRELFESSTNNNKDTKQKAGKLSFISVGNKFKTQLNLLLDKLRSTGASFIRCIKPNLKMTSHHFEGAQILSQLQCSGMVSVLDLMQGGYPSRASFHELYNMYKKYMPDKLARLDPRLFCKALFKALGLNENDYKFGLTKVFFRPGKFAEFDQIMKSDPDHLAELVKRVNHWLTCSRWKKVQWCSLSVIKLKNKIKYRAEACIKMQKTIRMWLCKRRHKPRIDGLVKVGTLKKRLDKFNEVVSVLKDGKPEMNKQIKNLEISIDTLMAKIKSTMMTQEQIQKEYDALVKSSEELLSALQKKKQQEEEAERLRRIQEEMEKERKRREEDEKRRRKEEEERRMKLEMEAKRKQEEEERKKREDDEKRIQAEVEAQLARQKEEESQQQAVLEQERRDRELALRIAQSEAELISDEAQADLALRRNDGTRPKMTPEQMAKEMSEFLSRGPAVLATKAAAGTKKYDLSKWKYAELRDTINTSCDIELLAACREEFHRRLKVYHAWKSKNKKRNTETEQRAPKSVTDYDFAPFLNNSPQQNPAAQIPARQREIEMNRQQRFFRIPFIRPADQYKDPQSKKKGWWYAHFDGPWIARQMELHPDKPPILLVAGKDDMEMCELNLEETGLTRKRGAEILPRQFEEIWERCGGIQYLQNAIESRQARPTYATAMLQSLLK

SEQ ID NO: 41 - DNA, 7367 bp, Homo sapiens
  misc_feature (1)..(7367): myosin VIIA MYO7A
ggcaggagagagagggagagacaagagacacacacagagagacggcgaggaagggaaagacccagagggacgcctagaacgagacttggagccagacagaggaagaggggacgtgtgtttgcagactggctgggcccgtgacccagcttcctgagtcctccgtgcaggtggcagctgtaccaggctggcaggtcactgagagtgggcagctgggccccagaactgtgcctggcccagtgggcagcaggagctcctgacttgggaccatggtgattcttcagcagggggaccatgtgtggatggacctgagattggggcaggagttcgacgtgcccatcggggcggtggtgaagctctgcgactctgggcaggtccaggtggtggatgatgaagacaatgaacactggatctctccgcagaacgcaacgcacatcaagcctatgcaccccacgtcggtccacggcgtggaggacatgatccgcctgggggacctcaacgaggcgggcatcttgcgcaacctgcttatccgctaccgggaccacctcatctacacgtatacgggctccatcctggtggctgtgaacccctaccagctgctctccatctactcgccagagcacatccgccagtataccaacaagaagattggggagatgcccccccacatctttgccattgctgacaactgctacttcaacatgaaacgcaacagccgagaccagtgctgcatcatcagtggggaatctggggccgggaagacggagagcacaaagctgatcctgcagttcctggcagccatcagtgggcagcactcgtggattgagcagcaggtcttggaggccacccccattctggaagcatttgggaatgccaagaccatccgcaatgacaactcaagccgtttcggaaagtacatcgacatccacttcaacaagcggggcgccatcgagggcgcgaagattgagcagtacctgctggaaaagtcacgtgtctgtcgccaggccctggatgaaaggaactaccacgtgttctactgcatgctggagggtatgagtgaggatcagaagaagaagctgggcttgggccaggcctctgactacaactacttggccatgggtaactgcataacctgtgagggccgggtggacagccaggagtacgccaacatccgctccgccatgaaggtgctcatgttcactgacaccgagaactgggagatctcgaagctcctggctgccatcctgcacctgggcaacctgcagtatgaggcacgcacatttgaaaacctggatgcctgtgaggttctcttctccccatcgctggccacagctgcatccctgcttgaggtgaaccccccagacctgatgagctgcctgactagccgcaccctcatcacccgcggggagacggtgtccaccccactgagcagggaacaggcactggacgtgcgcgacgccttcgtaaaggggatctacgggcggctgttcgtgtggattgtggacaagatcaacgcagcaatttacaagcctccctcccaggatgtgaagaactctcgcaggtccatcggcctcctggacatctttgggtttgagaactttgctgtgaacagctttgagcagctctgcatcaacttcgccaatgagcacctgcagcagttctttgtgcggcacgtgttcaagctggagcaggaggaatatgacctggagagcattgactggctgcacatcgagttcactgacaaccaggatgccctggacatgattgccaacaagcccatgaacatcatctccctcatcgatgaggagagcaagttccccaagggcacagacaccaccatgttacacaagctgaactcccagcacaagctcaacgccaactacatcccccccaagaacaaccatgagacccagtttggcatcaaccattttgcaggcatcgtctactatgagacccaaggcttcctggagaagaaccgagacaccctgcatggggacattatccagctggtccactcctccaggaacaagttcatcaagcagatcttccaggccgatgtcgccatgggcgccgagaccaggaagcgctcgcccacacttagcagccagttcaagcggtcactggagctgctgatgcgcacgctgggtgcctgccagcccttctttgtgcgatgcatcaagcccaatgagttcaagaagcccatgctgttcgaccggcacctgtgcgtgcgccagctgcggtactcaggaatgatggagaccatccgaatccgccgagctggctaccccatccgctacagcttcgtagagtttgtggagcggtaccgtgtgctgctgccaggtgtgaagccggcctacaagcagggcgacctccgcgggacttgccagcgcatggctgaggctgtgctgggcacccacgatgactggcagataggcaaaaccaagatctttctgaaggaccaccatgacatgctgctggaagtggagcgggacaaagccatcaccgacagagtcatcctccttcagaaagtcatccggggattcaaagacaggtctaactttctgaagctgaagaacgctgccacactgatccagaggcactggcggggtcacaactgtaggaagaactacgggctgatgcgtctgggcttcctgcggctgcaggccctgcaccgctcccggaagctgcaccagcagtaccgcctggcccgccagcgcatcatccagttccaggcccgctgccgcgcctatctggtgcgcaaggccttccgccaccgcctctgggctgtgctcaccgtgcaggcctatgcccggggcatgatcgcccgcaggctgcaccaacgcctcagggctgagtatctgtggcgcctcgaggctgagaaaatgcggctggcggaggaagagaagcttcggaaggagatgagcgccaagaaggccaaggaggaggccgagcgcaagcatcaggagcgcctggcccagctggctcgtgaggacgctgagcgggagctgaaggagaaggaggccgctcggcggaagaaggagctcctggagcagatggaaagggcccgccatgagcctgtcaatcactcagacatggtggacaagatgtttggcttcctggggacttcaggtggcctgccaggccaggagggccaggcacctagtggctttgaggacctggagcgagggcggagggagatggtggaggaggacctggatgcagccctgcccctgcctgacgaggatgaggaggacctctctgagtataaatttgccaagttcgcggccacctacttccaggggacaaccacgcactcctacacccggcggccactcaaacagccactgctctaccatgacgacgagggtgaccagctggcagccctggcggtctggatcaccatcctccgcttcatgggggacctccctgagcccaagtaccacacagccatgagtgatggcagtgagaagatccctgtgatgaccaagatttatgagaccctgggcaagaagacgtacaagagggagctgcaggccctgcagggcgagggcgaggcccagctccccgagggccagaagaagagcagtgtgaggcacaagctggtgcatttgactctgaaaaagaagtccaagctcacagaggaggtgaccaagaggctgcatgacggggagtccacagtgcagggcaacagcatgctggaggaccggcccacctccaacctggagaagctgcacttcatcatcggcaatggcatcctgcggccagcactccgggacgagatctactgccagatcagcaagcagctgacccacaacccctccaagagcagctatgcccggggctggattctcgtgtctctctgcgtgggctgtttcgccccctccgagaagtttgtcaagtacctgcggaacttcatccacgggggcccgcccggctacgccccgtactgtgaggagcgcctgagaaggacctttgtcaatgggacacggacacagccgcccagctggctggagctgcaggccaccaagtccaagaagccaatcatgttgcccgtgacattcatggatgggaccaccaagaccctgctgacggactcggcaaccacggccaaggagctctgcaacgcgctggccgacaagatctctctcaaggaccggttcgggttctccctctacattgccctgtttgacaaggtgtcctccctgggcagcggcagtgaccacgtcatggacgccatctcccagtgcgagcagtacgccaaggagcagggcgcccaggagcgcaacgccccctggaggctcttcttccgcaaagaggtcttcacgccctggcacagcccctccgaggacaacgtggccaccaacctcatctaccagcaggtggtgcgaggagtcaagtttggggagtacaggtgtgagaaggaggacgacctggctgagctggcctcccagcagtactttgtagactatggctctgagatgatcctggagcgcctcctgaacctcgtgcccacctacatccccgaccgcgagatcacgcccctgaagacgctggagaagtgggcccagctggccatcgccgcccacaagaaggggatttatgcccagaggagaactgatgcccagaaggtcaaagaggatgtggtcagttatgcccgcttcaagtggcccttgctcttctccaggttttatgaagcctacaaattctcaggccccagtctccccaagaacgacgtcatcgtggccgtcaactggacgggtgtgtactttgtggatgagcaggagcaggtacttctggagctgtccttcccagagatcatggccgtgtccagcagcaggggagcgaaaacgacggcccccagcttcacgctggccaccatcaagggggacgaatacaccttcacctccagcaatgctgaggacattcgtgacctggtggtcaccttcctagaggggctccggaagagatctaagtatgttgtggccctgcaggataaccccaaccccgcaggcgaggagtcaggcttcctcagctttgccaagggagacctcatcatcctggaccatgacacgggcgagcaggtcatgaactcgggctgggccaacggcatcaatgagaggaccaagcagcgtggggacttccccaccgacagtgtgtacgtcatgcccactgtcaccatgccaccgcgggagattgtggccctggtcaccatgactcccgatcagaggcaggacgttgtccggctcttgcagctgcgaacggcggagcccgaggtgcgtgccaagccctacacgctggaggagttttcctatgactacttcaggcccccacccaagcacacgctgagccgtgtcatggtgtccaaggcccgaggcaaggaccggctgtggagccacacgcgggaaccgctcaagcaggcgctgctcaagaagctcctgggcagtgaggagctctcgcaggaggcctgcctggccttcattgctgtgctcaagtacatgggcgactacccgtccaagaggacacgctccgtcaacgagctcaccgaccagatctttgagggtcccctgaaagccgagcccctgaaggacgaggcatatgtgcagatcctgaagcagctgaccgacaaccacatcaggtacagcgaggagcggggttgggagctgctctggctgtgcacgggccttttcccacccagcaacatcctcctgccccacgtgcagcgcttcctgcagtcccgaaagcactgcccactcgccatcgactgcctgcaacggctccagaaagccctgagaaacgggtcccggaagtaccctccgcacctggtggaggtggaggccatccagcacaagaccacccagattttccacaaagtctacttccctgatgacactgacgaggccttcgaagtggagtccagcaccaaggccaaggacttctgccagaacatcgccaccaggctgctcctcaagtcctcagagggattcagcctctttgtcaaaattgcagacaaggtcctcagcgttcctgagaatgacttcttctttgactttgttcgacacttgacagactggataaagaaagctcggcccatcaaggacggaattgtgccctcactcacctaccaggtgttcttcatgaagaagctgtggaccaccacggtgccagggaaggatcccatggccgattccatcttccactattaccaggagttgcccaagtatctccgaggctaccacaagtgcacgcgggaggaggtgctgcagctgggggcgctgatctacagggtcaagttcgaggaggacaagtcctacttccccagcatccccaagctgctgcgggagctggtgccccaggaccttatccggcaggtctcacctgatgactggaagcggtccatcgtcgcctacttcaacaagcacgcagggaagtccaaggaggaggccaagctggccttcctgaagctcatcttcaagtggcccacctttggctcagccttcttcgagcaaactacggagccaaacttccctgagatcctcctaattgccatcaacaagtatggggtcagcctcatcgatcccaaaacgaaggatatcctcaccactcatcccttcaccaagatctccaactggagcagcggcaacacctacttccacatcaccattgggaacttggtgcgcgggagcaaactgctctgcgagacgtcactgggctacaagatggatgacctcctgacttcctacattagccagatgctcacagccatgagcaaacagcggggctccaggagcggcaagtgaacagtcacggggaggtgctggttccatgcctgctctcgaggcagcagtgggttcaggcccatcagctacccctgcagctggggaagacttatgccatcccggcagcgaggctgggctggccagccaccactgactataccaactgggcctctgatgttcttccagtgaggcatctctctgggatgcagaacttccctccatccacccctctggcacctgggttggtctaatcctagtttgctgtggccttcccggttgtgagagcctgtgatccttagatgtgtctcctgtttcagaccagccccaccatgcaacttcctttgactttctgtgtaccactgggatagaggaatcaagaggacaatctagctctccatactttgaacaaccaaatgtgcattgaatactctgaaaccgaagggactggatctgcaggtgggatgagggagacagaccacttttctatattgcagtgtgaatgctgggcccctgctcaagtctaccctgatcacctcagggcataaagcatgtttcattctctggaaaaaaaaaaaaaaaaaaaaaaaaaaaaaa

SEQ ID NO: 42 - protein, 2175 aa, Homo sapiens
  MISC_FEATURE (1)..(2175): myosin VIIA MYO7A
MVILQQGDHVWMDLRLGQEFDVPIGAVVKLCDSGQVQVVDDEDNEHWISPQNATHIKPMHPTSVHGVEDMIRLGDLNEAGILRNLLIRYRDHLIYTYTGSILVAVNPYQLLSIYSPEHIRQYTNKKIGEMPPHIFAIADNCYFNMKRNSRDQCCIISGESGAGKTESTKLILQFLAAISGQHSWIEQQVLEATPILEAFGNAKTIRNDNSSRFGKYIDIHFNKRGAIEGAKIEQYLLEKSRVCRQALDERNYHVFYCMLEGMSEDQKKKLGLGQASDYNYLAMGNCITCEGRVDSQEYANIRSAMKVLMFTDTENWEISKLLAAILHLGNLQYEARTFENLDACEVLFSPSLATAASLLEVNPPDLMSCLTSRTLITRGETVSTPLSREQALDVRDAFVKGIYGRLFVWIVDKINAAIYKPPSQDVKNSRRSIGLLDIFGFENFAVNSFEQLCINFANEHLQQFFVRHVFKLEQEEYDLESIDWLHIEFTDNQDALDMIANKPMNIISLIDEESKFPKGTDTTMLHKLNSQHKLNANYIPPKNNHETQFGINHFAGIVYYETQGFLEKNRDTLHGDIIQLVHSSRNKFIKQIFQADVAMGAETRKRSPTLSSQFKRSLELLMRTLGACQPFFVRCIKPNEFKKPMLFDRHLCVRQLRYSGMMETIRIRRAGYPIRYSFVEFVERYRVLLPGVKPAYKQGDLRGTCQRMAEAVLGTHDDWQIGKTKIFLKDHHDMLLEVERDKAITDRVILLQKVIRGFKDRSNFLKLKNAATLIQRHWRGHNCRKNYGLMRLGFLRLQALHRSRKLHQQYRLARQRIIQFQARCRAYLVRKAFRHRLWAVLTVQAYARGMIARRLHQRLRAEYLWRLEAEKMRLAEEEKLRKEMSAKKAKEEAERKHQERLAQLAREDAERELKEKEAARRKKELLEQMERARHEPVNHSDMVDKMFGFLGTSGGLPGQEGQAPSGFEDLERGRREMVEEDLDAALPLPDEDEEDLSEYKFAKFAATYFQGTTTHSYTRRPLKQPLLYHDDEGDQLAALAVWITILRFMGDLPEPKYHTAMSDGSEKIPVMTKIYETLGKKTYKRELQALQGEGEAQLPEGQKKSSVRHKLVHLTLKKKSKLTEEVTKRLHDGESTVQGNSMLEDRPTSNLEKLHFIIGNGILRPALRDEIYCQISKQLTHNPSKSSYARGWILVSLCVGCFAPSEKFVKYLRNFIHGGPPGYAPYCEERLRRTFVNGTRTQPPSWLELQATKSKKPIMLPVTFMDGTTKTLLTDSATTAKELCNALADKISLKDRFGFSLYIALFDKVSSLGSGSDHVMDAISQCEQYAKEQGAQERNAPWRLFFRKEVFTPWHSPSEDNVATNLIYQQVVRGVKFGEYRCEKEDDLAELASQQYFVDYGSEMILERLLNLVPTYIPDREITPLKTLEKWAQLAIAAHKKGIYAQRRTDAQKVKEDVVSYARFKWPLLFSRFYEAYKFSGPSLPKNDVIVAVNWTGVYFVDEQEQVLLELSFPEIMAVSSSRGAKTTAPSFTLATIKGDEYTFTSSNAEDIRDLVVTFLEGLRKRSKYVVALQDNPNPAGEESGFLSFAKGDLIILDHDTGEQVMNSGWANGINERTKQRGDFPTDSVYVMPTVTMPPREIVALVTMTPDQRQDVVRLLQLRTAEPEVRAKPYTLEEFSYDYFRPPPKHTLSRVMVSKARGKDRLWSHTREPLKQALLKKLLGSEELSQEACLAFIAVLKYMGDYPSKRTRSVNELTDQIFEGPLKAEPLKDEAYVQILKQLTDNHIRYSEERGWELLWLCTGLFPPSNILLPHVQRFLQSRKHCPLAIDCLQRLQKALRNGSRKYPPHLVEVEAIQHKTTQIFHKVYFPDDTDEAFEVESSTKAKDFCQNIATRLLLKSSEGFSLFVKIADKVLSVPENDFFFDFVRHLTDWIKKARPIKDGIVPSLTYQVFFMKKLWTTTVPGKDPMADSIFHYYQELPKYLRGYHKCTREEVLQLGALIYRVKFEEDKSYFPSIPKLLRELVPQDLIRQVSPDDWKRSIVAYFNKHAGKSKEEAKLAFLKLIFKWPTFGSAFFEQTTEPNFPEILLIAINKYGVSLIDPKTKDILTTHPFTKISNWSSGNTYFHITIGNLVRGSKLLCETSLGYKMDDLLTSYISQMLTAMSKQRGSRSGK

SEQ ID NO: 43 - DNA, 11436 bp, Homo sapiens
  misc_feature (1)..(11436): myosin X MYO10
gagagctggctgagccgcggcgcgggactgctcacctccaagcgctcgcgcggggatcgcggctcctgctcactttgcggcccgctgtcctcctgcccgccccgagggcccccggccggagcgcagagggagggggccgcgctcgccagcaccccgccgccttcccccgcctgggggaagaatgtgccaccagctgttctccgcttgcgagcgctgcgcccagtagtgaggaacttggaggaagaagagacaaaggctgccgtcgggacgggcgagttagggacttgggtttgggcgaacaaaaggtgagaaggacaagaagggaccgggcgatggcagcaggggagccccgcgggcgcgcgtcctcgggagtggcgccgtgacacgcatggtttccccggacccgcggcggcgctgacttccgcgagtcggagcggcactcggcgagtccgggactgcgctggaacaatggataacttcttcaccgagggaacacgggtctggctgagagaaaatggccagcattttccaagtactgtaaattcctgtgcagaaggcatcgtcgtcttccggacagactatggtcaggtattcacttacaagcagagcacaattacccaccagaaggtgactgctatgcaccccacgaacgaggagggcgtggatgacatggcgtccttgacagagctccatggcggctccatcatgtataacttattccagcggtataagagaaatcaaatatatacctacatcggctccatcctggcctccgtgaacccctaccagcccatcgccgggctgtacgagcctgccaccatggagcagtacagccggcgccacctgggcgagctgcccccgcacatcttcgccatcgccaacgagtgctaccgctgcctgtggaagcgccacgacaaccagtgcatcctcatcagtggtgaaagtggggcaggtaaaaccgaaagcactaaattgatcctcaagtttctgtcagtcatcagtcaacagtctttggaattgtccttaaaggagaagacatcctgtgttgaacgagctattcttgaaagcagccccatcatggaagctttcggcaatgcgaagaccgtgtacaacaacaactctagtcgctttgggaagtttgttcagctgaacatctgtcagaaaggaaatattcagggcgggagaattgtagattatttattagaaaaaaaccgagtagtaaggcaaaatcccggggaaaggaattatcacatattttatgcactgctggcagggctggaacatgaagaaagagaagaattttatttatctacgccagaaaactaccactacttgaatcagtctggatgtgtagaagacaagacaatcagtgaccaggaatcctttagggaagttattacggcaatggacgtgatgcagttcagcaaggaggaagttcgggaagtgtcgaggctgcttgctggtatactgcatcttgggaacatagaatttatcactgctggtggggcacaggtttccttcaaaacagctttgggcagatctgcggagttacttgggctggacccaacacagctcacagatgctttgacccagagatcaatgttcctcaggggagaagagatcctcacgcctctcaatgttcaacaggcagtagacagcagggactccctggccatggctctgtatgcgtgctgctttgagtgggtaatcaagaagatcaacagcaggatcaaaggcaatgaggacttcaagtctattggcatcctcgacatctttggatttgaaaactttgaggttaatcactttgaacagttcaatataaactatgcaaacgagaaacttcaggagtacttcaacaagcatattttttctttagaacaactagaatatagccgggaaggattagtgtgggaagatattgactggatagacaatggagaatgcctggacttgattgagaagaaacttggcctcctagcccttatcaatgaagaaagccattttcctcaagccacagacagcaccttattggagaagctacacagtcagcatgcgaataaccacttttatgtgaagcccagagttgcagttaacaattttggagtgaagcactatgctggagaggtgcaatatgatgtccgaggtatcttggagaagaacagagatacatttcgagatgaccttctcaatttgctaagagaaagccgatttgactttatctacgatctttttgaacatgtttcaagccgcaacaaccaggataccttgaaatgtggaagcaaacatcggcggcctacagtcagctcacagttcaaggactcactgcattccttaatggcaacgctaagctcctctaatcctttctttgttcgctgtatcaagccaaacatgcagaagatgccagaccagtttgaccaggcggttgtgctgaaccagctgcggtactcagggatgctggagactgtgagaatccgcaaagctgggtatgcggtccgaagaccctttcaggacttttacaaaaggtataaagtgctgatgaggaatctggctctgcctgaggacgtccgagggaagtgcacgagcctgctgcagctctatgatgcctccaacagcgagtggcagctggggaagaccaaggtctttcttcgagaatccttggaacagaaactggagaagcggagggaagaggaagtgagccacgcggccatggtgattcgggcccatgtcttgggcttcttagcacgaaaacaatacagaaaggtcctttattgtgtggtgataatacagaagaattacagagcattccttctgaggaggagatttttgcacctgaaaaaggcagccatagttttccagaagcaactcagaggtcagattgctcggagagtttacagacaattgctggcagagaaaagggagcaagaagaaaagaagaaacaggaagaggaagaaaagaagaaacgggaggaagaagaaagagaaagagagagagagcgaagagaagccgagctccgcgcccagcaggaagaagaaacgaggaagcagcaagaactcgaagccttgcagaagagccagaaggaagctgaactgacccgtgaactggagaaacagaaggaaaataagcaggtggaagagatcctccgtctggagaaagaaatcgaggacctgcagcgcatgaaggagcagcaggagctgtcgctgaccgaggcttccctgcagaagctgcaggagcggcgggaccaggagctccgcaggctggaggaggaagcgtgcagggcggcccaggagttcctcgagtccctcaatttcgacgagatcgacgagtgtgtccggaatatcgagcggtccctgtcggtgggaagcgaattttccagcgagctggctgagagcgcatgcgaggagaagcccaacttcaacttcagccagccctacccagaggaggaggtcgatgagggcttcgaagccgacgacgacgccttcaaggactcccccaaccccagcgagcacggccactcagaccagcgaacaagtggcatccggaccagcgatgactcttcagaggaggacccatacatgaacgacacggtggtgcccaccagccccagtgcggacagcacggtgctgctcgccccatcagtgcaggactccgggagcctacacaactcctccagcggcgagtccacctactgcatgccccagaacgctggggacttgccctccccagacggcgactacgactacgaccaggatgactatgaggacggtgccatcacttccggcagcagcgtgaccttctccaactcctacggcagccagtggtcccccgactaccgctgctctgtggggacctacaacagctcgggtgcctaccggttcagctctgagggggcgcagtcctcgtttgaagatagtgaagaggactttgattccaggtttgatacagatgatgagctttcataccggcgtgactctgtgtacagctgtgtcactctgccgtatttccacagctttctgtacatgaaaggtggcctgatgaactcttggaaacgccgctggtgcgtcctcaaggatgaaaccttcttgtggttccgctccaagcaggaggccctcaagcaaggctggctccacaaaaaaggggggggctcctccacgctgtccaggagaaattggaagaagcgctggtttgtcctccgccagtccaagctgatgtactttgaaaacgacagcgaggagaagctcaagggcaccgtagaagtgcgaacggcaaaagagatcatagataacaccaccaaggagaatgggatcgacatcattatggccgataggactttccacctgattgcagagtccccagaagatgccagccagtggttcagcgtgctgagtcaggtccacgcgtccacggaccaggagatccaggagatgcatgatgagcaggcaaacccacagaatgctgtgggcaccttggatgtggggctgattgattctgtgtgtgcctctgacagccctgatagacccaactcgtttgtgatcatcacggccaaccgggtgctgcactgcaacgccgacacgccggaggagatgcaccactggataaccctgctgcagaggtccaaaggggacaccagagtggagggccaggaattcatcgtgagaggatggttgcacaaagaggtgaagaacagtccaaagatgtcttcactgaaactgaagaaacggtggtttgtactcacccacaattccctggattactacaagagttcagagaagaacgcgctcaaactggggaccctggtcctcaacagcctctgctctgtcgtccccccagatgagaagatattcaaagagacaggctactggaacgtcaccgtgtacgggcgcaagcactgttaccggctctacaccaagctgctcaacgaggccacccggtggtccagtgccattcaaaacgtgactgacaccaaggccccgatcgacacccccacccagcagctgattcaagatatcaaggagaactgcctgaactcggatgtggtggaacagatttacaagcggaacccgatccttcgatacacccatcaccccttgcactccccgctcctgccccttccgtatggggacataaatctcaacttgctcaaagacaaaggctataccacccttcaggatgaggccatcaagatattcaattccctgcagcaactggagtccatgtctgacccaattccaataatccagggcatcctacagacagggcatgacctgcgacctctgcgggacgagctgtactgccagcttatcaaacagaccaacaaagtgccccaccccggcagtgtgggcaacctgtacagctggcagatcctgacatgcctgagctgcaccttcctgccgagtcgagggattctcaagtatctcaagttccatctgaaaaggatacgggaacagtttccaggaagcgagatggaaaaatacgctctcttcacttacgaatctcttaagaaaaccaaatgccgagagtttgtgccttcccgagatgaaatagaagctctgatccacaggcaggaaatgacatccacggtctattgccatggcggcggctcctgcaagatcaccatcaactcccacaccaccgctggggaggtggtggagaagctgatccgaggcctggccatggaggacagcaggaacatgtttgctttgtttgaatacaacggccacgtcgacaaagccattgaaagtcgaaccgtcgtagctgatgtcttagccaagtttgaaaagctggctgccacatccgaggttggggacctgccatggaaattctacttcaaactttactgcttcctggacacagacaacgtgccaaaagacagtgtggagtttgcatttatgtttgaacaggcccacgaagcggttatccatggccaccatccagccccggaagaaaacctccaggttcttgctgccctgcgactccagtatctgcagggggattatactctgcacgctgccatcccacctctcgaagaggtttattccctgcagagactcaaggcccgcatcagccagtcaaccaaaaccttcaccccttgtgaacggctggagaagaggcggacgagcttcctagaggggaccctgaggcggagcttccggacaggatccgtggtccggcagaaggtcgaggaggagcagatgctggacatgtggattaaggaagaagtctcctctgctcgagccagtatcattgacaagtggaggaaatttcagggaatgaaccaggaacaggccatggccaagtacatggccttgatcaaggagtggcctggctatggctcgacgctgtttgatgtggagtgcaaggaaggtggcttccctcaggaactctggttgggtgtcagcgcggacgccgtctccgtctacaagcgtggagagggaagaccactggaagtcttccagtatgaacacatcctctcttttggggcacccctggcgaatacgtataagatcgtggtcgatgagagggagctgctctttgaaaccagtgaggtggtggatgtggccaagctcatgaaagcctacatcagcatgatcgtgaagaagcgctacagcacgacacgctccgccagcagccagggcagctccaggtgaaggcgggacagagcccacctgtctttgctacctgaacgcaccaccctctggcctaggctggctccagtgtgccatgcccagccaaaacaaacacagagctgcccaggctttctggaagcttctggtctgagggaggtgtctccgaggatccttttgcctgccgccttcattgatcctgtattaagctgtcaactttaacagtctgcacagtttccaaagctttactactcttagaggacacatgccttaaaaaaggaggggaggaaccacgctgccaccaaagcagccggaagtgccttaacttgtggaaccaacactaatcgaccgtaactgtgctactgaagggaactgcctttcccccttctgggggagacttaacagagcgtggaaggggggcattctctgtcaatgatgcactaacctcccaacctgatttccccgaatctgagggaaggtgagggagtgggaagggggatggagagctcgaggggacagtgtgtttgagctggagtgctgcgggcagcctttctcatggaatgacatgaatcaacttttttctttgtttcatcttttaagtgtacgtgcttgcctgttcgtgcatgtgttcataaactcaacactttaatcatggtttcatgagcattaaaaagcaaagggaaaaaggatgtgtaatggtgtacacagtctgtatattttaataatgcagagctatagtctcaattgttactttataaggtggttttattaacaaacccaaatcctggattttcctgtctttgctgtattttgaaaaacacgtgttgactccattgttttacatgtagcaaagtctgccatctgtgtctgctgtattataaacagataagcagcctacaagataactgtatttataaaccactcttcaacagctggctccagtgctggttttagaacaagaatgaagtcattttggagtctttcatgtctaaaagatttaagttaaaaacaaagtgttacttggaaggttagcttctatcattctggatagattacagatataataaccatgttgactatgggggagagacgctgcattccagaaacgtcttaacacttgagtgaatcttcaaaggaccctgacattaaatgctgaggctttaatacacacatattttatcccaagtttataatggtggtctgaacaaggcacctgtaaataaatcagcatttatgaccagaagaaaaataatctggtcttggactttttatttttatatggaaaagttttaaggacttgggccaactaagtctacccacacgaaaaaagaaatttgccttgtccctttgtgtacaaccatgcaaaactgtttgttggctcacagaagttctgacaataaaagatactagctaacacgctgtgtgtttcctttatcagaggaggctctaaaaaccatggaggggaggcttatttttgttttggctttttggtggttttttttttttttctttagagacagagtctcactctgttacccaggctggagtacagtggcgtgatctcggctcactgcagcctctgcctcctgggttctagcgattctcctgcctcagcctcccaaggagttgggagtacaggcatgcatcaccacgcctggctaggttttgtatttttagtagagatggggtttcaccatgttggccaggctggtctcgatccacctgcctcagcctcccaaagtgctgggattacaggtgtgagctaccgcacccggccggctttttggtgttaatgctatggtttcagtgtctgggctttgtgtttgtttcatggacttgctcatcaggtctaaacacagatctgcagctgtctccactgctcttgtagacactgagtgtgacttcaagaaagcaaaagaagggactggtaaatgaagtcacacacagctgaggacttgaaatgtgtttatgtcagacagtcccctatgtcagccccaaagtgtgcctgatcttgcaaccctggatcctagaacctgcctgcacctccctgtggaccagaacacacaggtaggcagtttggttgccaatgtacccaaaccaccaggccaggcgtctagcatgagcaagcgccacttctcttgcagaccactgactcccaccctctgctcatgctcacggatggcttcttcccattctgcagggattgggatggaacctgaagccaggtgctgcctgaagcctgtggccccgccaggcacccaaggaaagccggcaaagacttggatgtgtgttgtctttgtttttattttaggctcagaaagaatttgacagaagtcttctttctactgctcacctctcaggattccctctgtgacttaatttactctggaaggctgtcgcccgccctcaattatagatggggaaataggcaaggaaaggcatgactcagattgggggggttagagcagcaccatagttagaacatagatttacatgtgagcctttacatggcatagttgtggttttgttttagccttttatttagaaataattacagactcagagaaagttgcaacagaacgtacagggaggcctgcgtgcccttcagtttccccagtggtagcatcccccatcactgtagagcagcatcacagctgacaaagtaccgttgagcttcccctagccacagaacctattccaattttactgcttttacatgcactcattggtgtgtgtgatgtcagttgctttcaacaaggtcagtgaagtgcagtcgtcccttggtatccaagggagattggttccaggaccccctccccccacccctgaggatacaaaattcacagatgctcaagtccctgctatacagtggtataatatttgcatagaacctgcacacatctttccttaccctttaaatcatctccaggttacagatacctagcacaacataaatgctgcataaatagctgttataccgtgtgtgtctgtgttttaaacattgtttatttgagacagggtctcactctgtcaccaggctacagtgcagaggcacagtcacagctcattgcagcctcaacctcctgggctcaagcagtcctccacctcagcctcccaaagtgctaggatgacaggtgtgagccactgtgccccaccaaaaaaagttttttcaaatattttctatctgtggttggattcagaccacatgaacactgagggctgactgtagttttgaatgtctgttactgaggaggcaccagcataaagtattttatcacttcagacgctgacaatctagtatttttaatttttaaatcttttgaaagctaatacatataggtgatttgtaaaaaaaaaaaaaaaaaaaaaaaaaaaaaaaaaaaaaaacaactagaagtaaaatgttacttttttccagctgtagccctaattacccattttcctttcccagaaacagctatttttactgttttattgaatattctctcaaaaataatttaagctgtccaatcatttactcatacatacatatatatccccatcctcatttttaatagatggaaacaaactgttgtagcttacttttttctcagcatagtattttagctctaatcctacattaatacctatagaattgccttattctttttgatgattatatagtacctcagatagctctgtggaaaaacaggataaggccatctgtattagtccattctcacactgctagaaggacatgcctgagactgggtaatttataaagaaaaagaagttgaatggactcagtctcacatgcctggggaggcctcacaatcatggtggacagcaaaggaggagaaaaggcacatcttatatggcagcaggcaagagagcttgcacaggggaactcccttttataaaaccattagctcttccgagacatactcactatggacaagaacagcatgggaaaacccacccccatgattcaattacctcccatcaggtccctcccgtgacaggtggggattatgggagctataattcaagatgagatttgggtggggacagagccaaaccatatcaccacctaagttctctgtaaaaatagtttcagccaggcatgctggctcacgcctgtaatcccagcatgttggaaggccgaggcaagaggatcgcttgagctccggagttcaagaccagtctgggcaacatgacaagaccctgtctccacagaaaattaacattagccaggtgtggtggtgcgcatctgtagtcccagctactggggaggctgagatgagaaaatcgtttgaacccaggaggtcaaagctgcagggagccatgatggtgccactgcattctggtgtgggtgacagagcaagactctgtctccaaaaaaaaaaaaaaaaaaaaaaaatagttcagaaatctaagacagcactttttttagttactaagccttttattcagatagcacactaaattggggtcaaaaatctgctatagtaaagttctgtatttgtgtgtattgggtataaaaataagcgctttaattaatttgaaaatccctattcaccaaaagtttatactgtaataggggacaaaacaagtgcataaagctaaatttagccagtacatttataactgtttcattcagttgatcagagaagcatcacgattgctggaaaatatcggacctggattcaaggtttggcattgctgttttcaaagtatgtaatcttttagatcaggggtcagtgaactacagtacagagaccaaatctaccctgccacctgtttttgtgaataaagttttattgaaacagaaaaaaa

SEQ ID NO: 44 - protein, 2058 aa, Homo sapiens
  MISC_FEATURE (1)..(2058): myosin X MYO10
MDNFFTEGTRVWLRENGQHFPSTVNSCAEGIVVFRTDYGQVFTYKQSTITHQKVTAMHPTNEEGVDDMASLTELHGGSIMYNLFQRYKRNQIYTYIGSILASVNPYQPIAGLYEPATMEQYSRRHLGELPPHIFAIANECYRCLWKRHDNQCILISGESGAGKTESTKLILKFLSVISQQSLELSLKEKTSCVERAILESSPIMEAFGNAKTVYNNNSSRFGKFVQLNICQKGNIQGGRIVDYLLEKNRVVRQNPGERNYHIFYALLAGLEHEEREEFYLSTPENYHYLNQSGCVEDKTISDQESFREVITAMDVMQFSKEEVREVSRLLAGILHLGNIEFITAGGAQVSFKTALGRSAELLGLDPTQLTDALTQRSMFLRGEEILTPLNVQQAVDSRDSLAMALYACCFEWVIKKINSRIKGNEDFKSIGILDIFGFENFEVNHFEQFNINYANEKLQEYFNKHIFSLEQLEYSREGLVWEDIDWIDNGECLDLIEKKLGLLALINEESHFPQATDSTLLEKLHSQHANNHFYVKPRVAVNNFGVKHYAGEVQYDVRGILEKNRDTFRDDLLNLLRESRFDFIYDLFEHVSSRNNQDTLKCGSKHRRPTVSSQFKDSLHSLMATLSSSNPFFVRCIKPNMQKMPDQFDQAVVLNQLRYSGMLETVRIRKAGYAVRRPFQDFYKRYKVLMRNLALPEDVRGKCTSLLQLYDASNSEWQLGKTKVFLRESLEQKLEKRREEEVSHAAMVIRAHVLGFLARKQYRKVLYCVVIIQKNYRAFLLRRRFLHLKKAAIVFQKQLRGQIARRVYRQLLAEKREQEEKKKQEEEEKKKREEEERERERERREAELRAQQEEETRKQQELEALQKSQKEAELTRELEKQKENKQVEEILRLEKEIEDLQRMKEQQELSLTEASLQKLQERRDQELRRLEEEACRAAQEFLESLNFDEIDECVRNIERSLSVGSEFSSELAESACEEKPNFNFSQPYPEEEVDEGFEADDDAFKDSPNPSEHGHSDQRTSGIRTSDDSSEEDPYMNDTVVPTSPSADSTVLLAPSVQDSGSLHNSSSGESTYCMPQNAGDLPSPDGDYDYDQDDYEDGAITSGSSVTFSNSYGSQWSPDYRCSVGTYNSSGAYRFSSEGAQSSFEDSEEDFDSRFDTDDELSYRRDSVYSCVTLPYFHSFLYMKGGLMNSWKRRWCVLKDETFLWFRSKQEALKQGWLHKKGGGSSTLSRRNWKKRWFVLRQSKLMYFENDSEEKLKGTVEVRTAKEIIDNTTKENGIDIIMADRTFHLIAESPEDASQWFSVLSQVHASTDQEIQEMHDEQANPQNAVGTLDVGLIDSVCASDSPDRPNSFVIITANRVLHCNADTPEEMHHWITLLQRSKGDTRVEGQEFIVRGWLHKEVKNSPKMSSLKLKKRWFVLTHNSLDYYKSSEKNALKLGTLVLNSLCSVVPPDEKIFKETGYWNVTVYGRKHCYRLYTKLLNEATRWSSAIQNVTDTKAPIDTPTQQLIQDIKENCLNSDVVEQIYKRNPILRYTHHPLHSPLLPLPYGDINLNLLKDKGYTTLQDEAIKIFNSLQQLESMSDPIPIIQGILQTGHDLRPLRDELYCQLIKQTNKVPHPGSVGNLYSWQILTCLSCTFLPSRGILKYLKFHLKRIREQFPGSEMEKYALFTYESLKKTKCREFVPSRDEIEALIHRQEMTSTVYCHGGGSCKITINSHTTAGEVVEKLIRGLAMEDSRNMFALFEYNGHVDKAIESRTVVADVLAKFEKLAATSEVGDLPWKFYFKLYCFLDTDNVPKDSVEFAFMFEQAHEAVIHGHHPAPEENLQVLAALRLQYLQGDYTLHAAIPPLEEVYSLQRLKARISQSTKTFTPCERLEKRRTSFLEGTLRRSFRTGSVVRQKVEEEQMLDMWIKEEVSSARASIIDKWRKFQGMNQEQAMAKYMALIKEWPGYGSTLFDVECKEGGFPQELWLGVSADAVSVYKRGEGRPLEVFQYEHILSFGAPLANTYKIVVDERELLFETSEVVDVAKLMKAYISMIVKKRYSTTRSASSQGSSR

SEQ ID NO: 45 - DNA, 3209 bp, Homo sapiens
  misc_feature (1)..(3209): myosin XIX
gttcttcccgccgcctgacctggcccgcccgcctttccagtctggccgggcgggggcctgaagcacggcggctcgggccgtgggaccgtgttcacaccctttccagaaattcttggctggtaaccgcgaaaccgactggagcaggagctgggagaactggagaaaactgctctaatctcacttgactccagctaggagctgatgctgcatcgtaataacatttgcagagcgctttcacaggcgctggagtgacttgtctgagattcctccagaactgagccctttgttggaaccataccccagcccatggtcccatgactaggtggatagtactccttgtacctcctgcaacccagaaccctggctgaccactttgaaggaggatgctccagcaggtcaatggccacaatccggggtctgatggccaagccagggagtacctcagagaagacctgcaggagttcctgggtggggaggtcctgctgtacaaactggatgacctcaccagggtgaatcctgtgacactagagacagtcctgaggtgcctgcaggcccggtacatggcagacacattctacaccaatgctggctgcaccctggtagccttgaaccccttcaagcctgttcctcagctctactcgcccgagctaatgagagagtaccatgctgcgcctcagccccagaaactgaagccccatgtgttcactgtgggtgaacagacctacaggaatgtcaagagcctgattgaaccagtcaaccagtctattgttgtcagtggagagagtggtgctggaaagacatggacgtctcgctgcctaatgaagttctatgctgtggtggccacctcacctgcatcttgggagagccacaagattgcagagaggatagaacagaggatcctgaactccaaccctgtcatggaagcttttgggaatgcgtgtacactgaggaataacaacagcagtcgctttgggaagttcatccagctccagctgaacagggctcagcaaatgactggagccgcagtccagacctacctcctagagaaaactcgagtggcctgccaggcttccagtgagaggaacttccacatcttctatcagatttgcaaaggagccagtgaggacgagaggctccagtggcaccttcctgagggagctgccttctcctggctgcccaacccagagaggagcttagaagaggattgttttgaggtgaccagagaggccatgctccatttgggcattgacacccctacccagaacaacatctttaaggtcctagctggactgctgcaccttggcaatatccagtttgctgcctccgaggatgaagcccagccctgccagccgatggatgatgccaagtactctgtcaggacggcagcctcgctgctggggctcccagaggacgtgctgctggagatggtgcagattagaaccatcagggcaggcagacagcagcaggtgttccggaagccctgcgcccgagccgagtgtgacacccgtagagactgcctggccaaactgatctatgcgcggttgtttgactggctggtatcagtgatcaacagcagcatctgtgcagacaccgactcgtggaccactttcataggcctgctggatgtgtatggatttgaatcatttcctgacaacagtctggaacagttgtgcatcaactacgccaatgagaagctgcagctggaggcctgtggcctcgtggagaccatccatatcagtgctgctggcttccccatccgggtctctcaccgaaactttgtagaacgatacaagttactaagaaggcttcatccttgcacatcctctggccccgacagcccatatcctgccaaagggctccctgaatggtgtccacacagcgaggaagccacgcttgaacctctcatccaggacattctccacactctgccggtcctaactcaggcagcagccataactggtgactcggctgaggccatgccagcccccatgcactgtggcaggaccaaggtgttcatgactgactctatgctggagcttctggaatgtgggcgtgcccgggtgctggagcagtgtgcccgctgcatccagggtggctggaggcgacaccggcaccgagagcaggagcggcagtggcgggccgtcatgctcatccaggcagccattcgttcctggttaactcggaaacacatccagaggctgcatgcagctgccacagtcatcaagcgtgcatggcagaagtggagaatcagaatggcctgccttgctgctaaagagctggatggtgtggaagaaaaacacttctctcaagctccctgttccctgagcacctcgccgctgcagaccaggctcctggaggcaataatccgcctctggcccctgggactggtcctggccaatacggctatgggtgtaggcagctttcagaggaaattagtggtctgggcttgcctccagctccccaggggcagccccagtagctacactgtccagacagcacaagaccaggctggtgtcacgtccatccgagcgctgcctcagggatcgataaagtttcactgcagaaagtctccactgcggtatgctgacatctgccctgaaccttcaccctacagcattacaggctttaatcagattctgctggaaagacacaggctgatccacgtgacctcttctgccttcactgggctggggtgatccttggtgcctttgtttccacaaggccttttcctgccccctgccttgccaaagacatttaatcagcacacagctgccagactattcccacagtgctccaaatgcacatgaacaacagtgacggctccagccttcgacccagagccccgtgcccagtgcgtcagtgggcctggggttccaggctacatcaagcactgatggtgtcagggctggtagttaccaaatcagggttaagaaacatcagggccacatttcactaccttcacagatcaaactcagcagcagtcatgactgtctgtcactacactggggatcccaattccacataagcacttttggaagaaaacagccaaagttggcctaaaattggcgctggaatttgggctgggaaaaatcttgtggttatttcctttaaaaaggaacaaaactttagtatttaattagttgatttatttaatgtaatttcaaacaattaaattatgaataatgcaatgtaaaaaaaaaaaaaaaaaa

SEQ ID NO: 46 - protein, 770 aa, Homo sapiens
  MISC_FEATURE (1)..(770): myosin XIX
MLQQVNGHNPGSDGQAREYLREDLQEFLGGEVLLYKLDDLTRVNPVTLETVLRCLQARYMADTFYTNAGCTLVALNPFKPVPQLYSPELMREYHAAPQPQKLKPHVFTVGEQTYRNVKSLIEPVNQSIVVSGESGAGKTWTSRCLMKFYAVVATSPASWESHKIAERIEQRILNSNPVMEAFGNACTLRNNNSSRFGKFIQLQLNRAQQMTGAAVQTYLLEKTRVACQASSERNFHIFYQICKGASEDERLQWHLPEGAAFSWLPNPERSLEEDCFEVTREAMLHLGIDTPTQNNIFKVLAGLLHLGNIQFAASEDEAQPCQPMDDAKYSVRTAASLLGLPEDVLLEMVQIRTIRAGRQQQVFRKPCARAECDTRRDCLAKLIYARLFDWLVSVINSSICADTDSWTTFIGLLDVYGFESFPDNSLEQLCINYANEKLQLEACGLVETIHISAAGFPIRVSHRNFVERYKLLRRLHPCTSSGPDSPYPAKGLPEWCPHSEEATLEPLIQDILHTLPVLTQAAAITGDSAEAMPAPMHCGRTKVFMTDSMLELLECGRARVLEQCARCIQGGWRRHRHREQERQWRAVMLIQAAIRSWLTRKHIQRLHAAATVIKRAWQKWRIRMACLAAKELDGVEEKHFSQAPCSLSTSPLQTRLLEAIIRLWPLGLVLANTAMGVGSFQRKLVVWACLQLPRGSPSSYTVQTAQDQAGVTSIRALPQGSIKFHCRKSPLRYADICPEPSPYSITGFNQILLERHRLIHVTSSAFTGLG

SEQ ID NO: 47 - DNA, 7591 bp, Homo sapiens
  misc_feature (1)..(7591): myosin XVIIIA MYO18A transcript variant 1
tccatccctgaccgggccgaggctgctggatgccgcgtctccgcttctgctgcctgccgggcgggctccggtggccgcagcaaagtggggcaccaaggccctgtgctaagcactcataatcctctgggggtgctacccctacaaacagcacccccaccatgtttaacctaatgaagaaagacaaggacaaagatggcgggcggaaggagaagaaggagaaaaaggagaaaaaggagcggatgtcagcggcagagcttcggagcctggaggagatgagcctgcgacgtggcttcttcaacctgaaccgctcctccaagcgtgaatccaagacgcgcctggaaatctccaaccccatccccatcaaggtggccagcggctctgacctgcacctgactgacattgactccgatagtaaccggggcagcgtcatcctggactcgggccacctaagtacagccagctccagcgatgacctcaagggtgaggagggtagcttccgtggctcggtgctgcagcgggcagccaagttcggctcactggccaagcagaactcacagatgattgtcaagcgcttttccttctcccagcgtagccgggatgagagcgcctcagaaacctcgacgccctcagagcactctgccgccccctcgccacaggtggaggtgaggactctagagggacagctggtgcagcatcctggcccaggcatccctcgaccagggcaccgatcccgagcccctgagctagtgactaaaaagttcccagtcgacctgcgcctgccccccgtggtgcccctgcccccacctaccctccgggagctggagctgcaacgacggcccactggagactttggcttctccctgcggcgcacaaccatgctggatcggggccccgagggccaggcctgtcggcgtgtggtccactttgctgagcctggtgcaggcaccaaggacctggccctggggctggtgccaggagatcgactggtggagattaatgggcacaatgtggagagcaagtccagggatgagattgtggagatgatccggcagtcaggggacagcgtgcggctcaaggtgcagcccattccagagctcagcgagctcagcaggagctggctgcggagcggcgagggacctcgcagggagccatccgatgcgaaaacagaagaacagattgcagcagaagaggcctggaatgagacggagaaggtgtggctggtccatagggacggcttctcactggccagtcaactcaaatctgaggagctcaacttgcctgaggggaaggtgcgtgtgaagctggaccacgatggggccatcctggatgtggatgaggatgacgttgagaaggctaatgctccctcctgcgaccgtctggaggatctggcctcactggtgtacctcaatgagtccagcgtcctgcacaccttgcgccagcgctatggcgctagcctgctgcacacgtatgctggccccagcctgctggttcttggcccccgtggggcccctgctgtgtactctgagaaggtgatgcacatgttcaagggttgtcggcgggaggacatggcaccccacatctatgcagtggcccagaccgcatacagggcgatgctgatgagccgtcaggatcagtcaatcatcctcctgggcagtagtggcagtggcaagaccaccagctgccagcatctggtgcagtacctggccaccatcgcgggcatcagcgggaacaaggtgttttctgtggagaagtggcaggctctgtacaccctcctggaagcctttgggaacagccccaccatcattaatggcaatgccacccgcttctcccagatcctctccctggactttgaccaagctggccaggtggcctcagcctccattcagacaatgcttctggagaagctgcgtgtggctcggcgcccagccagtgaagccacattcaacgtcttctactacctgctggcctgtggggatggcaccctcaggacagagctccacctcaaccacttggcagagaacaatgtgtttgggattgtgccactggccaagcctgaggaaaagcagaaggcagctcagcagtttagtaagctgcaggcggccatgaaggtgctgggcatctcccccgatgaacagaaggcctgctggttcattctggctgccatctaccacctgggggctgcgggagccaccaaagaagctgctgaagctgggcgcaagcagtttgcccgccatgagtgggcccagaaggctgcgtacctactgggctgcagcctggaggagctgtcctcagccatcttcaagcaccagcacaagggtggcaccctgcagcgctccacctccttccgccagggccccgaggagagtggcctgggagatgggacaggcccgaaactgagtgcactggagtgccttgagggcatggcggccggcctctacagcgagctcttcacccttctcgtctccctggtgaatagggctctcaagtccagccagcactcactctgctccatgatgattgtcgacaccccgggcttccagaaccctgagcagggtgggtcagcccgcggagcctcctttgaggagctgtgccacaactacacccaagaccggctgcagaggctcttccacgagcgcaccttcgtgcaggagttggaaagatacaaggaggagaacatcgagctggcgtttgacgacttggaacccccgacggatgactctgtggctgctgtggaccaggcctcccatcagtccctggtccgctcgctggcccgcacagacgaggcgaggggcctgctctggctattggaagaggaggctctggtgccaggggccagtgaggacaccctcctggagcgccttttctcctattatggcccccaggaaggtgacaaaaaaggccaaagcccccttctgcacagcagcaaaccacaccactttctcctgggccacagccatggcaccaactgggtagagtacaatgtgactggctggctgaactacaccaagcagaacccagccacccagaatgccccccggctcctgcaggactcccagaaaaaaatcatcagcaacctgtttctgggccgcgcaggcagtgccacggtgctctctggctccatcgcgggcctggagggcggctcgcagctggcactgcgccgggccaccagcatgcggaaaacctttaccacaggcatggcggctgtcaaaaagaagtcactgtgcatccagatgaagctacaggtggacgccctcatcgacaccatcaagaagtcaaagctgcattttgtgcactgcttcctgcctgtagctgagggctgggctggggagccccgttccgcctcctcccgccgagtcagcagcagcagtgagctggacctgccctcgggagaccactgcgaggctgggctcctgcagctcgacgtgcccctgctccgcacccagctccgcggctcccgcctgctcgatgccatgcgcatgtaccgccaaggttaccctgaccacatggtgttttccgagttccgccgccgctttgatgtcctggccccgcacctgaccaagaaacacgggcgtaactacatcgtggtggatgaaaggcgggcagtggaggagctgctggagtgcttggatctggagaagagcagctgctgcatgggcctgagccgggtgttcttccgggcgggcaccttggcacggctggaggagcagcgggatgaacaaaccagcaggaacctaaccctgttccaagcagcctgcaggggctacctggcccgccagcacttcaagaagagaaagatccaggacctggccattcgctgtgtacagaagaacatcaagaagaacaaaggggtgaaggactggccctggtggaagctttttaccacagtgaggcccctcatcgaagtacagctgtcagaggagcagatccggaacaaagacgaggagatccagcagctgcggagcaagctcgagaaggcggagaaggagaggaacgagctgcggctcaacagtgaccggctggagagccggatctcagagctgacatcggagctgacagatgagcgtaacacaggagagtccgcctcccagctgctggacgcggagacagcagagaggctccgggctgagaaggagatgaaggaactgcagacccagtacgatgcactgaagaagcagatggaggttatggaaatggaggtgatggaggcccgtctcatccgggcagcggagatcaacggggaagtggatgatgatgatgcaggtggcgagtggcggctgaagtatgagcgggctgtgcgggaggtggacttcaccaagaaacggctccagcaggagtttgaggacaagctggaggtggagcagcagaacaagaggcagctggaacggcggctcggggacctgcaggcagatagtgaggagagtcagcgggctctgcagcagctcaagaagaagtgccagcgactgacggctgagctgcaagacaccaagctgcacctggagggccagcaggtccgcaaccacgaactggagaagaagcagaggaggtttgacagtgagctctcgcaggcgcatgaggaggcccagcgggagaagctgcagcgggagaagctgcagcgggagaaggacatgctcctcgctgaggctttcagcctgaagcagcaactagaggaaaaagacatggacattgcagggttcacccagaaggttgtgtctctagaggcagagctccaggacatttcttcccaagagtccaaggatgaggcttctctggccaaggtcaagaaacagctccgggacctggaggccaaagtcaaggatcaggaagaagagctggatgagcaggcagggaccatccagatgctggaacaggccaagctgcgtctggagatggagatggagcggatgagacagacccattctaaggagatggagagtcgggatgaggaggtggaggaggcccggcagtcgtgtcagaagaagttaaaacagatggaggtgcagctagaggaagagtatgaggacaagcagaaggttctgcgagagaagcgggagctggagggcaagctcgccaccctcagcgaccaggtgaaccggcgggactttgagtcagagaagcggctgcggaaggacctgaagcgcaccaaggccctgctggcagatgcccagctcatgctggaccacctgaagaacagtgctcccagcaagcgagagattgcccagctcaagaaccagctggaggagtcagagttcacctgtgcggcagccgtgaaagcacggaaagcaatggaggtggagatcgaagacctgcacctgcagattgatgacatcgccaaagccaagacagcgctggaggagcagctgagccgccttcagcgtgagaagaatgagatccagaaccggctggaggaagatcaggaagacatgaacgaattgatgaagaagcacaaggctgccgtggctcaggcttcccgggacctggctcagataaatgatctccaagctcagctagaagaagccaacaaagagaagcaggagctgcaggagaagctacaagccctccagagccaggtggagttcctggagcagtccatggtggacaagtccctggtgagcaggcaggaagctaagatacgggagctggagacacgcctggagtttgaaaggacgcaagtgaaacggctggagagcctggctagccgtctcaaggaaaacatggagaagctgactgaggagcgggatcagcgcattgcagccgagaaccgggagaaggaacagaacaagcggctacagaggcagctccgggacaccaaggaggagatgggcgagcttgccaggaaggaggccgaggcgagccgcaagaagcacgaactggagatggatctagaaagcctggaggctgctaaccagagcctgcaggctgacctaaagttggcattcaagcgcatcggggacctgcaggctgccattgaggatgagatggagagtgatgagaatgaggacctcatcaacagtttgcaggacatggtgacaaagtatcagaaaagaaagaataaacttgagggagactctgatgtggactcggagctggaggaccgtgttgacggggtcaagtcctggttgtcaaaaaacaagggaccttccaaggcagcttctgatgatggcagcttaaagagttccagccccaccagctactggaagtcccttgcccctgatcggtcagatgatgagcacgaccctctcgacaacacctccagaccgcgatactcccacagttatctgagtgacagcgacacagaggccaagctgacggagactaacgcatagcccaggggagtggttggcagccctctcaccccagggcctgtggctgcctgggcacctctcccaggaagtggtggggcaccggtctcccccacccgactgctgatctgcatgggaaacaccctgaccttcttctgtcaggggcactttccaggctatgggtgtctgatgtctccacgtggaagaggtgggggaaagaggagtttctgaagagaactttttgctcctctgtctcaaaatgccagactcttggcttctaccctgtgtcaccgtgggcagtggcaggtggcctggcactgcatggagccagcacgttgacctccctctcagctccctgctcagggacggtggacaggttgcctactgggacactctaggttgctgggtccatggggaggattgggggaggagaagcagtgccttccctctcgtgtggggtgggggctctctcttcttggtgcctgctgtctttctactttttaatttaaatacccaacctctccatcacagctgcatccctgagagtgggagggggctgtagtggtagctggggctcccaagaacgactcgggaatgtcatctccatcttcacccttcagagagcagtcctttctctgtgcagctggagacgctggtgaggagagccgggtccaggttcttaagaatgaggtgcggaggggctctccggtgctgctgggctgggttgagcaagcctacgcagacaagtgtgtgtgtggaccatccgcacctccagcccccaccccaccctctttgtctcagcgtgttatgtgcaatgacctatttaaggtaaacccattccaactacagcagttcagggctgatccaagcactgcctccctcctgctctgtccaggtggtctggaccataaactcaacttgagagggaaggcttggggttgaggacttgtgatcagaaaaactgaagatggaagttttggccggtgctcattagacatgagtcctcactctgtgtcctgagcccgtgtcattcttccaacctccctgcccccacacacttatcccagacacaacaccatgtggtctggaggtcccagcccccaccctaaaaaggttatccctgagaactccaccagacttgggagcccaagtgcagtgcctggtgctgctcccatctgccgccccccttctctcctgcaattggtttgtactcactgggctgtgctctcccctgtttacccgatgtatggaaataaaggcccttttcctcctggctgcgccagtaaaaaaaa

SEQ ID NO: 48 - protein, 2054 aa, Homo sapiens
  MISC_FEATURE (1)..(2054): myosin XVIIIA MYO18A transcript variant 1
MFNLMKKDKDKDGGRKEKKEKKEKKERMSAAELRSLEEMSLRRGFFNLNRSSKRESKTRLEISNPIPIKVASGSDLHLTDIDSDSNRGSVILDSGHLSTASSSDDLKGEEGSFRGSVLQRAAKFGSLAKQNSQMIVKRFSFSQRSRDESASETSTPSEHSAAPSPQVEVRTLEGQLVQHPGPGIPRPGHRSRAPELVTKKFPVDLRLPPVVPLPPPTLRELELQRRPTGDFGFSLRRTTMLDRGPEGQACRRVVHFAEPGAGTKDLALGLVPGDRLVEINGHNVESKSRDEIVEMIRQSGDSVRLKVQPIPELSELSRSWLRSGEGPRREPSDAKTEEQIAAEEAWNETEKVWLVHRDGFSLASQLKSEELNLPEGKVRVKLDHDGAILDVDEDDVEKANAPSCDRLEDLASLVYLNESSVLHTLRQRYGASLLHTYAGPSLLVLGPRGAPAVYSEKVMHMFKGCRREDMAPHIYAVAQTAYRAMLMSRQDQSIILLGSSGSGKTTSCQHLVQYLATIAGISGNKVFSVEKWQALYTLLEAFGNSPTIINGNATRFSQILSLDFDQAGQVASASIQTMLLEKLRVARRPASEATFNVFYYLLACGDGTLRTELHLNHLAENNVFGIVPLAKPEEKQKAAQQFSKLQAAMKVLGISPDEQKACWFILAAIYHLGAAGATKEAAEAGRKQFARHEWAQKAAYLLGCSLEELSSAIFKHQHKGGTLQRSTSFRQGPEESGLGDGTGPKLSALECLEGMAAGLYSELFTLLVSLVNRALKSSQHSLCSMMIVDTPGFQNPEQGGSARGASFEELCHNYTQDRLQRLFHERTFVQELERYKEENIELAFDDLEPPTDDSVAAVDQASHQSLVRSLARTDEARGLLWLLEEEALVPGASEDTLLERLFSYYGPQEGDKKGQSPLLHSSKPHHFLLGHSHGTNWVEYNVTGWLNYTKQNPATQNAPRLLQDSQKKIISNLFLGRAGSATVLSGSIAGLEGGSQLALRRATSMRKTFTTGMAAVKKKSLCIQMKLQVDALIDTIKKSKLHFVHCFLPVAEGWAGEPRSASSRRVSSSSELDLPSGDHCEAGLLQLDVPLLRTQLRGSRLLDAMRMYRQGYPDHMVFSEFRRRFDVLAPHLTKKHGRNYIVVDERRAVEELLECLDLEKSSCCMGLSRVFFRAGTLARLEEQRDEQTSRNLTLFQAACRGYLARQHFKKRKIQDLAIRCVQKNIKKNKGVKDWPWWKLFTTVRPLIEVQLSEEQIRNKDEEIQQLRSKLEKAEKERNELRLNSDRLESRISELTSELTDERNTGESASQLLDAETAERLRAEKEMKELQTQYDALKKQMEVMEMEVMEARLIRAAEINGEVDDDDAGGEWRLKYERAVREVDFTKKRLQQEFEDKLEVEQQNKRQLERRLGDLQADSEESQRALQQLKKKCQRLTAELQDTKLHLEGQQVRNHELEKKQRRFDSELSQAHEEAQREKLQREKLQREKDMLLAEAFSLKQQLEEKDMDIAGFTQKVVSLEAELQDISSQESKDEASLAKVKKQLRDLEAKVKDQEEELDEQAGTIQMLEQAKLRLEMEMERMRQTHSKEMESRDEEVEEARQSCQKKLKQMEVQLEEEYEDKQKVLREKRELEGKLATLSDQVNRRDFESEKRLRKDLKRTKALLADAQLMLDHLKNSAPSKREIAQLKNQLEESEFTCAAAVKARKAMEVEIEDLHLQIDDIAKAKTALEEQLSRLQREKNEIQNRLEEDQEDMNELMKKHKAAVAQASRDLAQINDLQAQLEEANKEKQELQEKLQALQSQVEFLEQSMVDKSLVSRQEAKIRELETRLEFERTQVKRLESLASRLKENMEKLTEERDQRIAAENREKEQNKRLQRQLRDTKEEMGELARKEAEASRKKHELEMDLESLEAANQSLQADLKLAFKRIGDLQAAIEDEMESDENEDLINSLQDMVTKYQKRKNKLEGDSDVDSELEDRVDGVKSWLSKNKGPSKAASDDGSLKSSSPTSYWKSLAPDRSDDEHDPLDNTSRPRYSHSYLSDSDTEAKLTETNA

SEQ ID NO: 49 - DNA, 7546 bp, Homo sapiens
  misc_feature (1)..(7546): myosin XVIIIA MYO18A transcript variant 2
tccatccctgaccgggccgaggctgctggatgccgcgtctccgcttctgctgcctgccgggcgggctccggtggccgcagcaaagtggggcaccaaggccctgtgctaagcactcataatcctctgggggtgctacccctacaaacagcacccccaccatgtttaacctaatgaagaaagacaaggacaaagatggcgggcggaaggagaagaaggagaaaaaggagaaaaaggagcggatgtcagcggcagagcttcggagcctggaggagatgagcctgcgacgtggcttcttcaacctgaaccgctcctccaagcgtgaatccaagacgcgcctggaaatctccaaccccatccccatcaaggtggccagcggctctgacctgcacctgactgacattgactccgatagtaaccggggcagcgtcatcctggactcgggccacctaagtacagccagctccagcgatgacctcaagggtgaggagggtagcttccgtggctcggtgctgcagcgggcagccaagttcggctcactggccaagcagaactcacagatgattgtcaagcgcttttccttctcccagcgtagccgggatgagagcgcctcagaaacctcgacgccctcagagcactctgccgccccctcgccacaggtggaggtgaggactctagagggacagctggtgcagcatcctggcccaggcatccctcgaccagggcaccgatcccgagcccctgagctagtgactaaaaagttcccagtcgacctgcgcctgccccccgtggtgcccctgcccccacctaccctccgggagctggagctgcaacgacggcccactggagactttggcttctccctgcggcgcacaaccatgctggatcggggccccgagggccaggcctgtcggcgtgtggtccactttgctgagcctggtgcaggcaccaaggacctggccctggggctggtgccaggagatcgactggtggagattaatgggcacaatgtggagagcaagtccagggatgagattgtggagatgatccggcagtcaggggacagcgtgcggctcaaggtgcagcccattccagagctcagcgagctcagcaggagctggctgcggagcggcgagggacctcgcagggagccatccgatgcgaaaacagaagaacagattgcagcagaagaggcctggaatgagacggagaaggtgtggctggtccatagggacggcttctcactggccagtcaactcaaatctgaggagctcaacttgcctgaggggaaggtgcgtgtgaagctggaccacgatggggccatcctggatgtggatgaggatgacgttgagaaggctaatgctccctcctgcgaccgtctggaggatctggcctcactggtgtacctcaatgagtccagcgtcctgcacaccttgcgccagcgctatggcgctagcctgctgcacacgtatgctggccccagcctgctggttcttggcccccgtggggcccctgctgtgtactctgagaaggtgatgcacatgttcaagggttgtcggcgggaggacatggcaccccacatctatgcagtggcccagaccgcatacagggcgatgctgatgagccgtcaggatcagtcaatcatcctcctgggcagtagtggcagtggcaagaccaccagctgccagcatctggtgcagtacctggccaccatcgcgggcatcagcgggaacaaggtgttttctgtggagaagtggcaggctctgtacaccctcctggaagcctttgggaacagccccaccatcattaatggcaatgccacccgcttctcccagatcctctccctggactttgaccaagctggccaggtggcctcagcctccattcagacaatgcttctggagaagctgcgtgtggctcggcgcccagccagtgaagccacattcaacgtcttctactacctgctggcctgtggggatggcaccctcaggacagagctccacctcaaccacttggcagagaacaatgtgtttgggattgtgccactggccaagcctgaggaaaagcagaaggcagctcagcagtttagtaagctgcaggcggccatgaaggtgctgggcatctcccccgatgaacagaaggcctgctggttcattctggctgccatctaccacctgggggctgcgggagccaccaaagaagctgctgaagctgggcgcaagcagtttgcccgccatgagtgggcccagaaggctgcgtacctactgggctgcagcctggaggagctgtcctcagccatcttcaagcaccagcacaagggtggcaccctgcagcgctccacctccttccgccagggccccgaggagagtggcctgggagatgggacaggcccgaaactgagtgcactggagtgccttgagggcatggcggccggcctctacagcgagctcttcacccttctcgtctccctggtgaatagggctctcaagtccagccagcactcactctgctccatgatgattgtcgacaccccgggcttccagaaccctgagcagggtgggtcagcccgcggagcctcctttgaggagctgtgccacaactacacccaagaccggctgcagaggctcttccacgagcgcaccttcgtgcaggagttggaaagatacaaggaggagaacatcgagctggcgtttgacgacttggaacccccgacggatgactctgtggctgctgtggaccaggcctcccatcagtccctggtccgctcgctggcccgcacagacgaggcgaggggcctgctctggctattggaagaggaggctctggtgccaggggccagtgaggacaccctcctggagcgccttttctcctattatggcccccaggaaggtgacaaaaaaggccaaagcccccttctgcacagcagcaaaccacaccactttctcctgggccacagccatggcaccaactgggtagagtacaatgtgactggctggctgaactacaccaagcagaacccagccacccagaatgccccccggctcctgcaggactcccagaaaaaaatcatcagcaacctgtttctgggccgcgcaggcagtgccacggtgctctctggctccatcgcgggcctggagggcggctcgcagctggcactgcgccgggccaccagcatgcggaaaacctttaccacaggcatggcggctgtcaaaaagaagtcactgtgcatccagatgaagctacaggtggacgccctcatcgacaccatcaagaagtcaaagctgcattttgtgcactgcttcctgcctgtagctgagggctgggctggggagccccgttccgcctcctcccgccgagtcagcagcagcagtgagctggacctgccctcgggagaccactgcgaggctgggctcctgcagctcgacgtgcccctgctccgcacccagctccgcggctcccgcctgctcgatgccatgcgcatgtaccgccaaggttaccctgaccacatggtgttttccgagttccgccgccgctttgatgtcctggccccgcacctgaccaagaaacacgggcgtaactacatcgtggtggatgaaaggcgggcagtggaggagctgctggagtgcttggatctggagaagagcagctgctgcatgggcctgagccgggtgttcttccgggcgggcaccttggcacggctggaggagcagcgggatgaacaaaccagcaggaacctaaccctgttccaagcagcctgcaggggctacctggcccgccagcacttcaagaagagaaagatccaggacctggccattcgctgtgtacagaagaacatcaagaagaacaaaggggtgaaggactggccctggtggaagctttttaccacagtgaggcccctcatcgaagtacagctgtcagaggagcagatccggaacaaagacgaggagatccagcagctgcggagcaagctcgagaaggcggagaaggagaggaacgagctgcggctcaacagtgaccggctggagagccggatctcagagctgacatcggagctgacagatgagcgtaacacaggagagtccgcctcccagctgctggacgcggagacagcagagaggctccgggctgagaaggagatgaaggaactgcagacccagtacgatgcactgaagaagcagatggaggttatggaaatggaggtgatggaggcccgtctcatccgggcagcggagatcaacggggaagtggatgatgatgatgcaggtggcgagtggcggctgaagtatgagcgggctgtgcgggaggtggacttcaccaagaaacggctccagcaggagtttgaggacaagctggaggtggagcagcagaacaagaggcagctggaacggcggctcggggacctgcaggcagatagtgaggagagtcagcgggctctgcagcagctcaagaagaagtgccagcgactgacggctgagctgcaagacaccaagctgcacctggagggccagcaggtccgcaaccacgaactggagaagaagcagaggaggtttgacagtgagctctcgcaggcgcatgaggaggcccagcgggagaagctgcagcgggagaagctgcagcgggagaaggacatgctcctcgctgaggctttcagcctgaagcagcaactagaggaaaaagacatggacattgcagggttcacccagaaggttgtgtctctagaggcagagctccaggacatttcttcccaagagtccaaggatgaggcttctctggccaaggtcaagaaacagctccgggacctggaggccaaagtcaaggatcaggaagaagagctggatgagcaggcagggaccatccagatgctggaacaggccaagctgcgtctggagatggagatggagcggatgagacagacccattctaaggagatggagagtcgggatgaggaggtggaggaggcccggcagtcgtgtcagaagaagttaaaacagatggaggtgcagctagaggaagagtatgaggacaagcagaaggttctgcgagagaagcgggagctggagggcaagctcgccaccctcagcgaccaggtgaaccggcgggactttgagtcagagaagcggctgcggaaggacctgaagcgcaccaaggccctgctggcagatgcccagctcatgctggaccacctgaagaacagtgctcccagcaagcgagagattgcccagctcaagaaccagctggaggagtcagagttcacctgtgcggcagccgtgaaagcacggaaagcaatggaggtggagatcgaagacctgcacctgcagattgatgacatcgccaaagccaagacagcgctggaggagcagctgagccgccttcagcgtgagaagaatgagatccagaaccggctggaggaagatcaggaagacatgaacgaattgatgaagaagcacaaggctgccgtggctcaggcttcccgggacctggctcagataaatgatctccaagctcagctagaagaagccaacaaagagaagcaggagctgcaggagaagctacaagccctccagagccaggtggagttcctggagcagtccatggtggacaagtccctggtgagcaggcaggaagctaagatacgggagctggagacacgcctggagtttgaaaggacgcaagtgaaacggctggagagcctggctagccgtctcaaggaaaacatggagaagctgactgaggagcgggatcagcgcattgcagccgagaaccgggagaaggaacagaacaagcggctacagaggcagctccgggacaccaaggaggagatgggcgagcttgccaggaaggaggccgaggcgagccgcaagaagcacgaactggagatggatctagaaagcctggaggctgctaaccagagcctgcaggctgacctaaagttggcattcaagcgcatcggggacctgcaggctgccattgaggatgagatggagagtgatgagaatgaggacctcatcaacagtgagggagactctgatgtggactcggagctggaggaccgtgttgacggggtcaagtcctggttgtcaaaaaacaagggaccttccaaggcagcttctgatgatggcagcttaaagagttccagccccaccagctactggaagtcccttgcccctgatcggtcagatgatgagcacgaccctctcgacaacacctccagaccgcgatactcccacagttatctgagtgacagcgacacagaggccaagctgacggagactaacgcatagcccaggggagtggttggcagccctctcaccccagggcctgtggctgcctgggcacctctcccaggaagtggtggggcaccggtctcccccacccgactgctgatctgcatgggaaacaccctgaccttcttctgtcaggggcactttccaggctatgggtgtctgatgtctccacgtggaagaggtgggggaaagaggagtttctgaagagaactttttgctcctctgtctcaaaatgccagactcttggcttctaccctgtgtcaccgtgggcagtggcaggtggcctggcactgcatggagccagcacgttgacctccctctcagctccctgctcagggacggtggacaggttgcctactgggacactctaggttgctgggtccatggggaggattgggggaggagaagcagtgccttccctctcgtgtggggtgggggctctctcttcttggtgcctgctgtctttctactttttaatttaaatacccaacctctccatcacagctgcatccctgagagtgggagggggctgtagtggtagctggggctcccaagaacgactcgggaatgtcatctccatcttcacccttcagagagcagtcctttctctgtgcagctggagacgctggtgaggagagccgggtccaggttcttaagaatgaggtgcggaggggctctccggtgctgctgggctgggttgagcaagcctacgcagacaagtgtgtgtgtggaccatccgcacctccagcccccaccccaccctctttgtctcagcgtgttatgtgcaatgacctatttaaggtaaacccattccaactacagcagttcagggctgatccaagcactgcctccctcctgctctgtccaggtggtctggaccataaactcaacttgagagggaaggcttggggttgaggacttgtgatcagaaaaactgaagatggaagttttggccggtgctcattagacatgagtcctcactctgtgtcctgagcccgtgtcattcttccaacctccctgcccccacacacttatcccagacacaacaccatgtggtctggaggtcccagcccccaccctaaaaaggttatccctgagaactccaccagacttgggagcccaagtgcagtgcctggtgctgctcccatctgccgccccccttctctcctgcaattggtttgtactcactgggctgtgctctcccctgtttacccgatgtatggaaataaaggcccttttcctcctggctgcgccagtaaaaaaaa

SEQ ID NO: 50 - protein, 2039 aa, Homo sapiens
  MISC_FEATURE (1)..(2039): myosin XVIIIA MYO18A transcript variant 2
MFNLMKKDKDKDGGRKEKKEKKEKKERMSAAELRSLEEMSLRRGFFNLNRSSKRESKTRLEISNPIPIKVASGSDLHLTDIDSDSNRGSVILDSGHLSTASSSDDLKGEEGSFRGSVLQRAAKFGSLAKQNSQMIVKRFSFSQRSRDESASETSTPSEHSAAPSPQVEVRTLEGQLVQHPGPGIPRPGHRSRAPELVTKKFPVDLRLPPVVPLPPPTLRELELQRRPTGDFGFSLRRTTMLDRGPEGQACRRVVHFAEPGAGTKDLALGLVPGDRLVEINGHNVESKSRDEIVEMIRQSGDSVRLKVQPIPELSELSRSWLRSGEGPRREPSDAKTEEQIAAEEAWNETEKVWLVHRDGFSLASQLKSEELNLPEGKVRVKLDHDGAILDVDEDDVEKANAPSCDRLEDLASLVYLNESSVLHTLRQRYGASLLHTYAGPSLLVLGPRGAPAVYSEKVMHMFKGCRREDMAPHIYAVAQTAYRAMLMSRQDQSIILLGSSGSGKTTSCQHLVQYLATIAGISGNKVFSVEKWQALYTLLEAFGNSPTIINGNATRFSQILSLDFDQAGQVASASIQTMLLEKLRVARRPASEATFNVFYYLLACGDGTLRTELHLNHLAENNVFGIVPLAKPEEKQKAAQQFSKLQAAMKVLGISPDEQKACWFILAAIYHLGAAGATKEAAEAGRKQFARHEWAQKAAYLLGCSLEELSSAIFKHQHKGGTLQRSTSFRQGPEESGLGDGTGPKLSALECLEGMAAGLYSELFTLLVSLVNRALKSSQHSLCSMMIVDTPGFQNPEQGGSARGASFEELCHNYTQDRLQRLFHERTFVQELERYKEENIELAFDDLEPPTDDSVAAVDQASHQSLVRSLARTDEARGLLWLLEEEALVPGASEDTLLERLFSYYGPQEGDKKGQSPLLHSSKPHHFLLGHSHGTNWVEYNVTGWLNYTKQNPATQNAPRLLQDSQKKIISNLFLGRAGSATVLSGSIAGLEGGSQLALRRATSMRKTFTTGMAAVKKKSLCIQMKLQVDALIDTIKKSKLHFVHCFLPVAEGWAGEPRSASSRRVSSSSELDLPSGDHCEAGLLQLDVPLLRTQLRGSRLLDAMRMYRQGYPDHMVFSEFRRRFDVLAPHLTKKHGRNYIVVDERRAVEELLECLDLEKSSCCMGLSRVFFRAGTLARLEEQRDEQTSRNLTLFQAACRGYLARQHFKKRKIQDLAIRCVQKNIKKNKGVKDWPWWKLFTTVRPLIEVQLSEEQIRNKDEEIQQLRSKLEKAEKERNELRLNSDRLESRISELTSELTDERNTGESASQLLDAETAERLRAEKEMKELQTQYDALKKQMEVMEMEVMEARLIRAAEINGEVDDDDAGGEWRLKYERAVREVDFTKKRLQQEFEDKLEVEQQNKRQLERRLGDLQADSEESQRALQQLKKKCQRLTAELQDTKLHLEGQQVRNHELEKKQRRFDSELSQAHEEAQREKLQREKLQREKDMLLAEAFSLKQQLEEKDMDIAGFTQKVVSLEAELQDISSQESKDEASLAKVKKQLRDLEAKVKDQEEELDEQAGTIQMLEQAKLRLEMEMERMRQTHSKEMESRDEEVEEARQSCQKKLKQMEVQLEEEYEDKQKVLREKRELEGKLATLSDQVNRRDFESEKRLRKDLKRTKALLADAQLMLDHLKNSAPSKREIAQLKNQLEESEFTCAAAVKARKAMEVEIEDLHLQIDDIAKAKTALEEQLSRLQREKNEIQNRLEEDQEDMNELMKKHKAAVAQASRDLAQINDLQAQLEEANKEKQELQEKLQALQSQVEFLEQSMVDKSLVSRQEAKIRELETRLEFERTQVKRLESLASRLKENMEKLTEERDQRIAAENREKEQNKRLQRQLRDTKEEMGELARKEAEASRKKHELEMDLESLEAANQSLQADLKLAFKRIGDLQAAIEDEMESDENEDLINSEGDSDVDSELEDRVDGVKSWLSKNKGPSKAASDDGSLKSSSPTSYWKSLAPDRSDDEHDPLDNTSRPRYSHSYLSDSDTEAKLTETNA

SEQ ID NO: 51 - DNA, 8565 bp, Homo sapiens
  misc_feature (1)..(8565): myosin XVIIIB MYO18B
gggaagggatgtgtgtcggtgtgtgtggagagggtgctccttcgctcctgctttcccggctcggtggggtcccttcgcggccacccggggagacgtcttagacagtcgtggttcctgtgatctgtgtcctctttgcagaagttctgtgtccatctcatgtgctgcgtgtgtctgtaaagcctcattccgtgctgtctggcaggaagctccatctcatctcatcatctcacggccctggcactgcctcagcatggccatctcatcacgcctcgccctgtgggagcagaagattcgggaagaggacaagagccctccaccatcctcgccccctcctcttttctctgtcatcccagggggcttcattaagcaactggtccgggggactgaaaaagaggccaaggaagcgagacagaggaagcagttagctgtcgcctctccagaacgagagatcccagaaatttccatcagccaacccaacagcaagtccagcagtggcaccagatctggaagccagcagatctctcaggacgaccagtcaagctctcctgggagctcagacattctgggcaaggagagcgaggggtcccgcagccccgaccctgagcagatgacaagcatcaatggtgagaaggcccaggagctgggctccagtgcgacaccaaccaaaaagactgtccccttcaagaggggcgtgaggaggggtgatgtgttgttgatggtggccaagctggacccggactcagccaagccagagaagactcatccccatgacgcccccccttgcaagacctctccccccgccacagatactggaaaggaaaagaaaggggagacctctaggactccttgtggctcccaggccagcaccgagatcttggccccgaaagctgagaagacccggactgggggtcttggggacccaggccaaggaactgtggcactgaaaaaaggcgaggagggtcaaagcatagtggggaaggggcttgggacccccaagaccacagagctgaaagaggctgagccccagggcaaagacaggcaggggaccaggccccaagcccaagggcccggcgagggggtgcgaccagggaaagcagagaaggagggagcagagcccacaaacacggtggaaaaggggaatgtctctaaggacgtagggagtgaagggaagcacgtaaggccccaaatccctgggagaaagtggggaggtttcctgggaagaaggagtaagtgggacggtccccagaataagaaggacaaagaaggggtgctcttaagtaaggcagagaagacaggtgagcctcagacccagatggagaagacaagccaagtgcagggcgagttgggggacgatctgagaatgggggagaaagcaggtgagcttcggagcacgactgggaaggcaggtgagtcctgggataagaaggaaaagatggggcaaccccagggtaagtccgggaacgcaggtgaagctcggagtcagacagagaagggctgtgaagccccaaaggaggtgagcacaatggtggagtcgccagcagctcctgggaagggaggctggccaggaagccgtgggcaggaagcagaggagccctgctcaagagcaggtgatggggctggtgccctggagacagagctggaaggacccagccagcctgctctggagaaggatgcagaaaggcctcggatacggaaggagaaccaagacgggccagccccgcaggaggagggcaaaggaggccagagcagagactcagaccaggctcctgaggacagatggtatgaggcagagaaagtctggctggctcagaaggatggatttactcttgctacggtgctaaagccagatgagggaacagcagacctgccagcaggaagggtgagactttggattgatgctgacaaaaccatcactgaggtggatgaggagcatgtccatcgggccaaccctcctgagctggaccaggtcgaggacctggcctctctcatcagtgtcaacgaatccagtgtcctgaacacgcttctgcagcgctacaaagctcagctgctgcacacctgcacagggcctgatctgattgtcctccagccccgggggccctcggtgccttctgcagggaaggtgcccaagggccgccgggatggcctgcctgcccacattggctccatggcacagcgggcatactgggcgctgctgaaccagcggagagaccagagcattgtggccctgggctggagtggcgctgggaagaccacctgctgtgagcaggtcctggaacacctggtggggatggcaggcagtgtggatggcagggtctcagtggagaagatccgagccaccttcactgtcctccgggccttcggctctgtgtccatggcccacagccgcagtgccacccggttctccatggtgatgtcgctggacttcaacgctacaggccgcatcacagctgctcagctccagacaatgcttttggagaagagccgcgtggcacggcagccggaaggggaaagtaacttcctggttttctcccagatgctggctggattggacttggatctcaggacggagctgaacctgcaccagatggcagatagcagctcctttggcatgggcgtgtggtccaagcctgaagataaacagaaggcggcagctgcctttgcccagctccagggtgccatggagatgctcggcatctcagagagcgagcagcgggctgtttggcgggtcctggcagccatctaccacctgggtgcggcgggggcctgcaaagtgggtcggaagcagttcatgaggtttgagtgggcaaactacgcagctgaggccctgggctgcgagtatgaggagctgaacacggccaccttcaagcaccaccttcgacagatcatccagcaaatgacgtttgggccaagccgatggggcctcgaggatgaggaaaccagctcagggctcaagatgacaggagtggactgtgtggaggggatggcctcgggcctgtaccaggaactctttgcggctgtggtctcactcatcaacagatccttttcctcccaccatctctccatggcctccatcatggtggtggactctccaggcttccagaacccccggcaccagggcaaggaccgggcggccacctttgaggagctgtgccacaactacgcccatgagcgcctgcagctgctgttctaccagcggacctttgtctccacgctacagcgatatcaagaggaaggtgttcctgtgcagtttgacctcccggacccctccccagggaccaccgtggctgttgtggatcaaaatccctctcaggtccgcttaccagctggaggaggtgcccaggatgccagaggccttttctgggtcttagatgaggaagtccatgtagagggctccagtgacagtgtggtgctcgagcgtctgtgtgctgctttcgagaagaaaggagctgggactgaagggtcctctgccctgcggacctgtgagcagcccctccagtgtgagattttccaccagttgggatgggaccctgtgcggtacgacctcacgggctggctccacagagccaagcccaacctctcggccctggatgcaccccaggtcctgcaccagtcaaaaagagaggagctgcggagtctattccaggcccgggccaagctgcctcctgtgtgccgggctgtggcaggcctggagggcacctcccagcaggccctgcagaggagccgcatggtgaggaggacctttgccagcagccttgccgcggtgaggaggaaagccccgtgctcccagatcaagctgcagatggatgcgctgaccagcatgatcaaaaggtcccggctgcactttatccactgcctggtaccaaaccctgtggtggaaagcaggagtgggcaggaatctccaccaccaccgcagcctggtagagacaagcctggggcaggtggacctctggccctggatatcccagcactgagggtccagcttgctgggttccacatcctggaggctctgcgtctgcataggacaggctatgctgaccacatggggctcactcgcttccgccggcaattccaggtgctggacgctccactcctgaagaagctcatgtcgacctccgagggaatagatgaaaggaaggccgtggaggagctcctggagaccctggatctggaaaagaaggcggtggctgtggggcacagccaagtttttctcaaggcaggtgtgatctccaggcttgagaagcagcgagagaagctggtatctcagagcatcgttctcttccaggcggcttgcaagggctttctgtctcgccaggaattcaagaagctgaagattcgccgactggctgcacagtgcatccagaagaatgtggctgtgttcctcgcagtcaaggactggccatggtggcagctgcttggttccctccagcctctacttagtgccaccattggaactgagcagctccgagccaaggaggaggagcttacaacgctaagacggaagctagaaaaatcagagaagttgcggaatgaactccggcagaacacagatctgctagaaagcaagattgctgacttgacctctgaccttgccgatgagcgcttcaaaggtgatgtggcctgccaggtgctggagagtgagcgggcagagcggctacaggccttccgggaggtccaggagctcaagagcaagcatgaacaagtccagaaaaaactgggagatgtgaataaacagttggaagaagcccagcagaaaattcagttgaatgacttggaaaggaatcccactggaggagcagacgagtggcagatgcgcttcgactgtgctcagatggagaacgagttcctcagaaagcgtctgcagcaatgcgaggagaggctggactcggagctgacagccaggaaagagctggagcaaaagcttggggagttgcaaagtgcttatgacggggccaagaagatggctcaccaactgaagaggaagtgccaccatcttacctgtgaccttgaggatacctgcgtcctgctagagaaccaacaaagtcgaaaccatgagctggagaagaagcagaagaagtttgacctgcagctggcccaggccctaggtgagtcagtgtttgagaagggtctccgtgagaaagtgacccaggagaacaccagtgtccggtgggagctaggccagcttcagcagcagctgaagcaaaaggagcaggaagcctcacagctgaagcagcaggtggagatgctacaggaccataaacgggagctgctggggtcaccctctctgggggaaaattgcgttgctggcttgaaggagaggctctggaagttggaatccagcgcccttgagcaacagaaaatccagagccagcaggaaaacaccatcaagcagctggagcagctccgccagcggtttgagctggagatcgagcggatgaagcagatgcaccagaaggaccgtgaggaccaggaggaggaactggaggatgtccgtcagtcctgccagaagcggcttcatcagctggaaatgcagctggagcaagagtatgaagagaagcagatggtcctccatgagaagcaagatttggaaggcttgatcggaaccctctgtgaccagattggccatcgggactttgatgtggagaagcgacttcggagagacctcaggaggacacatgcactgttgtcagacgtgcagctccttctgggcaccatggaggatggcaagacatcagtcagcaaggaggagctggagaaagtgcacagccagctggagcagagtgaagccaagtgtgaggaggccttgaagacgcagaaggtgctcacagcggacctggagagcatgcacagcgagctggagaacatgacgcggaacaagagcctggtggatgagcagctgtacaggctgcagtttgagaaggcggacctcctgaagcgcatcgatgaggaccaggatgacctgaatgagctgatgcagaagcacaaggacctcattgctcagtctgctgctgacattgggcagatccaagaactgcagctgcagctggaggaagccaagaaggagaagcacaagctacaagaacaactgcaggtggctcagatgcgcatcgagtacctggaacagtccaccgtggatcgagccatcgtcagcaggcaggaggcggtcatctgtgacctagagaacaagacagagttccagaaggtgcagattaagagatttgaggtcctggtgatccggcttcgggacagcctgatcaagatgggggaggagctttcacaggcggccacctccgagtcccagcagcgggagagcagccagtactaccagcggcgcctggaagagctgaaggccgacatggaagagctggtgcagcgggaggcagaggccagccggcggtgcatggagctggagaagtacgtggaggaacttgcagcagtgaggcaaaccctccagacagacctggagacatccattcggcggattgccgacctgcaggctgccttggaagaagtggcatccagtgacagtgatactgagagtgtccagacggcagtggattgtggcagcagcggccgaaaagagatggataacgtctccatcctcagctcccagccagagggcagcctgcagtcctggttgagctgtactctgtccctggccacagatactatgaggactccttctcgacagtcagccaccagcagccgcatcctcagccccaggataaacgaagaggctggggacactgagaggacccagtcggcattggcactgagcagagcccggtccaccaatgtccacagcaagacctcaggagacaagcctgtttctccccactttgtccgccggcaaaagtactgtcattttggggacggcgaagtgcttgccgtccagagaaagtccacagagagattagaacctgcttcctctcccctggcttctcggagtacaaatacatccccgctgtcgagggaaaagctgcccagtccttcagcggccctctcggagttcgtggaagggctccggaggaagagagcccagagaggccaggggtccacgctgggcctagaggactggcccactctccccatttaccagacgactggggcctccacactaaggaggggcagggctggcagtgacgagggaaacctctcgctgagggttggggcaaagtcacccctggaaatcgaaggggccgctggtggtctcttgaggtccaccagcctcaaatgcatctcttcagacggtgttgggggcacaaccctactccccgaaaagtcgaaaacccaattcagttcctgcgagtccctcttagaatccagaccgagcatggggagaaaactgagctctccgaccacacccagggacatgctgttgtcgcccacactgcgtcctcggaggcggtgtctggagtcctctgtggacgatgcgggctgtccagaccttggaaaggagccgcttgttttccagaaccgccagtttgcccacctgatggaggaacctctaggcagtgacccattcagctggaaactcccaagcctcgactacgaacgcaagaccaaagtggacttcgatgacttcctcccagctatccggaagccccagacacctacctccttggctggatcagccaaaggtgggcaagacggttcacagcgttcaagcatccactttgaaacggaagaggctaaccgttcctttctctcggggatcaagaccattttgaagaagagcccggagcccaaggaggatcccgctcacctgtctgactcgtcctcatcctccggctccatcgtgtccttcaaaagtgctgacagcatcaaaagtcgaccaggaatcccacgacttgcgggtgacggtggcgagcgaacgtcccccgagcggagagagccagggacggggaggaaagacgacgatgttgcgagcataatgaagaaatacctccagaagtaggaaccagttcagcctccttgaagctgcccttgaagacttcccgactctacaataacttggagacagagagactggccaggcctccccggtggccagagccagccagcatggccaccctcaagaggcgagatgagcccacagaggcatatcctgcggggatgctgggctcccagtgtggttggcctgaacaaaataaagtgttgactcctgggcatctgtgccttctctatggccttgctacctgggattccagagagttgatggggtgcagataggggtaggactgttagaatagaaccaacccaaactgtgtgtagtttggggtgtatacttctatttctcttcctacatgtctacatgccatgaccttcctcctcctcttcacttggccagtttcagctcacttcctccaggaagtctttcctgatatatcaaactgaaacaaatgctcctcctccatgctcccttaatccccatgcttgtcgattatattcctttgccaattcatttctctatcctgtgtatgtataagtgtgtacaagcattcaagaaactgatgaatgatgaatgaatgaatgagccaaagaacaaataaatgagcccacacaccc

SEQ ID NO: 52 - protein, 2567 aa, Homo sapiens
  MISC_FEATURE (1)..(2567): myosin XVIIIB MYO18B
MAISSRLALWEQKIREEDKSPPPSSPPPLFSVIPGGFIKQLVRGTEKEAKEARQRKQLAVASPEREIPEISISQPNSKSSSGTRSGSQQISQDDQSSSPGSSDILGKESEGSRSPDPEQMTSINGEKAQELGSSATPTKKTVPFKRGVRRGDVLLMVAKLDPDSAKPEKTHPHDAPPCKTSPPATDTGKEKKGETSRTPCGSQASTEILAPKAEKTRTGGLGDPGQGTVALKKGEEGQSIVGKGLGTPKTTELKEAEPQGKDRQGTRPQAQGPGEGVRPGKAEKEGAEPTNTVEKGNVSKDVGSEGKHVRPQIPGRKWGGFLGRRSKWDGPQNKKDKEGVLLSKAEKTGEPQTQMEKTSQVQGELGDDLRMGEKAGELRSTTGKAGESWDKKEKMGQPQGKSGNAGEARSQTEKGCEAPKEVSTMVESPAAPGKGGWPGSRGQEAEEPCSRAGDGAGALETELEGPSQPALEKDAERPRIRKENQDGPAPQEEGKGGQSRDSDQAPEDRWYEAEKVWLAQKDGFTLATVLKPDEGTADLPAGRVRLWIDADKTITEVDEEHVHRANPPELDQVEDLASLISVNESSVLNTLLQRYKAQLLHTCTGPDLIVLQPRGPSVPSAGKVPKGRRDGLPAHIGSMAQRAYWALLNQRRDQSIVALGWSGAGKTTCCEQVLEHLVGMAGSVDGRVSVEKIRATFTVLRAFGSVSMAHSRSATRFSMVMSLDFNATGRITAAQLQTMLLEKSRVARQPEGESNFLVFSQMLAGLDLDLRTELNLHQMADSSSFGMGVWSKPEDKQKAAAAFAQLQGAMEMLGISESEQRAVWRVLAAIYHLGAAGACKVGRKQFMRFEWANYAAEALGCEYEELNTATFKHHLRQIIQQMTFGPSRWGLEDEETSSGLKMTGVDCVEGMASGLYQELFAAVVSLINRSFSSHHLSMASIMVVDSPGFQNPRHQGKDRAATFEELCHNYAHERLQLLFYQRTFVSTLQRYQEEGVPVQFDLPDPSPGTTVAVVDQNPSQVRLPAGGGAQDARGLFWVLDEEVHVEGSSDSVVLERLCAAFEKKGAGTEGSSALRTCEQPLQCEIFHQLGWDPVRYDLTGWLHRAKPNLSALDAPQVLHQSKREELRSLFQARAKLPPVCRAVAGLEGTSQQALQRSRMVRRTFASSLAAVRRKAPCSQIKLQMDALTSMIKRSRLHFIHCLVPNPVVESRSGQESPPPPQPGRDKPGAGGPLALDIPALRVQLAGFHILEALRLHRTGYADHMGLTRFRRQFQVLDAPLLKKLMSTSEGIDERKAVEELLETLDLEKKAVAVGHSQVFLKAGVISRLEKQREKLVSQSIVLFQAACKGFLSRQEFKKLKIRRLAAQCIQKNVAVFLAVKDWPWWQLLGSLQPLLSATIGTEQLRAKEEELTTLRRKLEKSEKLRNELRQNTDLLESKIADLTSDLADERFKGDVACQVLESERAERLQAFREVQELKSKHEQVQKKLGDVNKQLEEAQQKIQLNDLERNPTGGADEWQMRFDCAQMENEFLRKRLQQCEERLDSELTARKELEQKLGELQSAYDGAKKMAHQLKRKCHHLTCDLEDTCVLLENQQSRNHELEKKQKKFDLQLAQALGESVFEKGLREKVTQENTSVRWELGQLQQQLKQKEQEASQLKQQVEMLQDHKRELLGSPSLGENCVAGLKERLWKLESSALEQQKIQSQQENTIKQLEQLRQRFELEIERMKQMHQKDREDQEEELEDVRQSCQKRLHQLEMQLEQEYEEKQMVLHEKQDLEGLIGTLCDQIGHRDFDVEKRLRRDLRRTHALLSDVQLLLGTMEDGKTSVSKEELEKVHSQLEQSEAKCEEALKTQKVLTADLESMHSELENMTRNKSLVDEQLYRLQFEKADLLKRIDEDQDDLNELMQKHKDLIAQSAADIGQIQELQLQLEEAKKEKHKLQEQLQVAQMRIEYLEQSTVDRAIVSRQEAVICDLENKTEFQKVQIKRFEVLVIRLRDSLIKMGEELSQAATSESQQRESSQYYQRRLEELKADMEELVQREAEASRRCMELEKYVEELAAVRQTLQTDLETSIRRIADLQAALEEVASSDSDTESVQTAVDCGSSGRKEMDNVSILSSQPEGSLQSWLSCTLSLATDTMRTPSRQSATSSRILSPRINEEAGDTERTQSALALSRARSTNVHSKTSGDKPVSPHFVRRQKYCHFGDGEVLAVQRKSTERLEPASSPLASRSTNTSPLSREKLPSPSAALSEFVEGLRRKRAQRGQGSTLGLEDWPTLPIYQTTGASTLRRGRAGSDEGNLSLRVGAKSPLEIEGAAGGLLRSTSLKCISSDGVGGTTLLPEKSKTQFSSCESLLESRPSMGRKLSSPTTPRDMLLSPTLRPRRRCLESSVDDAGCPDLGKEPLVFQNRQFAHLMEEPLGSDPFSWKLPSLDYERKTKVDFDDFLPAIRKPQTPTSLAGSAKGGQDGSQRSSIHFETEEANRSFLSGIKTILKKSPEPKEDPAHLSDSSSSSGSIVSFKSADSIKSRPGIPRLAGDGGERTSPERREPGTGRKDDDVASIMKKYLQK

SEQ ID NO: 53 - DNA, 6038 bp, Homo sapiens
  misc_feature (1)..(6038): myosin, heavy chain 1, skeletal muscle, adult (MYH1)
gtctctcctcataaagcttcaagttctgatccactttaaggtcgcatctctacgccagggtccttaactgggctaccatcaataacctgcagccatgagttccgactctgagatggccatttttggggaggctgctcctttcctccgaaagtctgaaagggagcgaattgaagcccagaacaagccttttgatgccaagacatcagtctttgtggtggaccctaaggagtcctttgtgaaagcaacagtgcagagcagggaaggggggaaggtgacagctaagaccgaagctggagctactgtaacagtgaaagatgaccaagtcttccccatgaaccctcccaaatatgacaagatcgaggacatggccatgatgactcatctacacgagcctgctgtgctgtacaacctcaaagagcgctacgcagcctggatgatctacacctactcaggcttgttctgtgtcactgtcaacccctacaagtggttgccagtgtataatgcagaggtggtgacagcctaccgaggcaaaaagcgccaggaggccccaccccacatcttctccatctctgacaatgcctatcagttcatgctgactgatcgggagaatcagtctatcttgatcaccggagaatctggcgcagggaagactgtgaacaccaagcgtgtcatccagtactttgcaacaattgcagttactggggagaagaagaaggaagaagttacttctggcaaaatgcaggggactctggaagatcaaatcatcagtgccaaccccctactggaggcctttggcaacgccaagaccgtgaggaatgacaactcctctcgctttggtaaattcatcaggatccacttcggtaccacagggaaactggcttctgctgatattgaaacatatcttctggagaagtctagagttactttccagctaaaggctgaaagaagctatcatattttttatcagatcatgtctaacaagaagccagatctaattgaaatgctcctgatcaccaccaacccatacgattatgccttcgtcagtcaaggggagatcacagtgcccagcattgatgaccaagaagagttgatggctacagatagtgccattgaaattctgggctttacttcagatgaaagagtgtccatctataagctcacaggggctgtgatgcattatgggaacatgaaattcaagcaaaagcagcgtgaggagcaagctgagccagatggcactgaagttgctgacaaggcagcctatctccaaaatctgaactctgcagatctgctcaaagccctctgctaccctagggtcaaggtcggcaatgagtatgtcaccaaaggtcaaactgtgcagcaggtgtacaatgcagtgggtgctctggccaaagctgtctacgataagatgttcttgtggatggtcacccgcatcaaccagcagctggacaccaagcagcccaggcagtacttcattggggtcttggacattgctggctttgagatctttgatttcaacagcctggagcagctgtgcatcaacttcaccaatgagaaactgcaacagtttttcaaccaccacatgttcgtgctggagcaggaggagtacaagaaggaaggcattgagtggacgttcattgactttgggatggacctggctgcctgcatcgagctcatcgagaagcctatgggcatcttctccatcctggaagaggagtgcatgttccccaaggcgacagacacctccttcaagaacaagctgtatgaacaacatcttggaaaatccaataacttccagaagcccaagcctgccaaaggcaagcctgaggcccacttctctttgattcactatgctggcaccgtggactacaacattgccggctggcttgacaagaacaaggaccccctgaatgagactgtggtggggctgtaccagaagtctgcaatgaagactctggctctcctctttgttggggcaacgggagcggaagcagaggctggcggtggaaagaaaggtggtaagaagaagggttcttctttccagactgtgtctgctctcttcagggagaatttgaataagctgatgaccaacttgaggagcactcacccccactttgtgcggtgcatcatccccaatgaaactaaaactcctggtgccatggagcatgagcttgtcctgcatcagctgaggtgtaacggtgtgctggaaggcatccgcatctgcaggaaaggcttcccaagcagaatcctttatgcagacttcaaacagagatacaaggtgttaaatgcaagtgctatccctgaaggacaattcatcgatagcaagaaggcttcagagaagctcctggggtccattgacattgaccacacccagtataaatttggtcacaccaaggtctttttcaaagctggtcttctggggctcctagaggagatgcgagatgagaagctggcccagctgattacccgaacccaggccatgtgcagagggttcttggcaagagtggagtaccagaaaatggtggaaagaagagagtccatcttctgcatccagtacaatgtccgtgccttcatgaatgtgaagcactggccctggatgaagctgtatttcaagatcaaacccctcctcaaaagtgcagagacagagaaggagatggccaacatgaaggaagaatttgagaaaaccaaagaagagctggctaagaccgaggcaaaaaggaaagagctggaagaaaaaatggttactctgatgcaagaaaaaaatgacttgcaactccaggttcaagctgaagctgacagcttggctgatgcagaggaaaggtgtgaccagctaatcaaaaccaaaatccagctagaagccaaaatcaaagaggtgactgagagagctgaggatgaggaagagatcaatgctgagctgacagccaagaagaggaaactggaggatgaatgttcagaactcaagaaagacattgatgaccttgagctgacactggccaaggttgagaaggagaaacatgccacagaaaacaaggtgaaaaacctcacagaagagatggcgggtctggatgaaaccattgctaagctgaccaaggagaagaaggctctccaggaggcccaccagcagaccctggatgacctgcaggcagaggaggacaaagtcaacaccctgaccaaagctaaaatcaaacttgaacaacaagtggatgatcttgaaggatctttggaacaagaaaagaaaatccggatggatctagaaagagcaaagagaaaactagagggagacctaaaattggctcaagaatccacaatggatatagaaaatgacaaacaacaacttgatgaaaagcttaaaaagaaagagtttgaaatgagcggtctgcaaagcaagattgaagatgaacaagcccttggtatgcagctgcagaagaaaatcaaggagttacaagcccgcattgaggagctggaggaggaaatcgaggcagagcgggcctcccgggccaaagcagagaagcagcgctctgatctctcccgggagctggaggagatcagcgagaggctggaagaagccggtggggccacctcagcccagattgagatgaacaagaagcgggaggctgagttccagaaaatgcgcagggacctggaggaggccaccctacagcatgaagccacggcggccaccctgaggaagaagcatgcagatagtgtggccgagcttggggagcagattgacaacctgcagcgagtgaagcagaagctggagaaggagaagagtgagatgaagatggagatcgatgaccttgctagtaacatggagactgtctccaaagccaagggaaaccttgaaaagatgtgccgcgctctagaagatcaactgagtgaaattaagaccaaggaagaggagcagcagcggctgatcaatgacctcacagcacagagagcgcgcctgcaaacagaatcaggtgaatattcacgccagctagatgaaaaggacacactagtttcacagctctcgaggggcaaacaagcctttacacaacagattgaggaactgaaaaggcaacttgaagaggagataaaggccaagagtgccctggcacatgccctgcagtcctcccgccatgactgtgacctgctgcgggaacagtatgaggaggagcaggaagccaaggccgagctacagagagcaatgtccaaggccaacagtgaggttgcccagtggaggaccaaatatgagacagatgccatccagcgcacagaggagctggaggaggccaagaagaagctggctcagcgtctgcaggatgctgaggaacatgtagaagctgtgaatgccaaatgtgcttcccttgagaagacgaagcagaggctccagaatgaagttgaggacctcatgattgatgttgagaggacaaatgctgcctgtgccgccctggacaaaaagcaaaggaactttgataagatcctggcagaatggaaacagaagtgtgaagaaactcatgctgaacttgaagcttctcaaaaggaatcccgctcactcagcacagaactatttaagattaagaatgcttatgaggaatctttagaccaacttgaaaccttgaaacgggaaaataagaatttgcaacaggagatttctgatctcactgaacagattgcagaaggaggaaagcgcatccatgaactggaaaaaataaagaagcaagttgagcaagaaaagtctgaacttcaggctgccttagaggaggcagaggcatctcttgaacatgaagagggaaagatcctgcgcatccagcttgagttgaaccaagtcaagtctgaggttgataggaaaattgctgaaaaagatgaggaaattgaccagatgaagagaaaccacattagaatcgtggagtccatgcagagcacactggatgctgagatcaggagcaggaatgatgccattaggctcaagaagaagatggagggagacctcaatgaaatggaaatccagctgaaccatgccaaccgcatggctgctgaggccctgaggaactataggaacacccaagccatcctcaaggatacccagctccacctggatgatgctctccggagccaggaggacctgaaggaacagctggctatggtggagcgcagagccaacctgctgcaggctgagatcgaggagctgcgggccactctggaacagacagagaggagcaggaaaatcgcagaacaggagctcctggatgccagtgagcgtgttcagctcctgcacacccagaacaccagcctgatcaacaccaagaagaagctggagacagacatttcccaaatccagggagagatggaagacatcatccaggaagcccgcaatgcagaagagaaggccaagaaggccatcactgatgctgccatgatggctgaggagctgaagaaggaacaggacaccagcgcccatctggagcggatgaagaagaacctggaacagacggtgaaggacctgcagcatcgtctggatgaggctgagcagctggccctgaagggtgggaagaagcagatccagaaactggaggccagggttcgtgaacttgaaggtgaagttgaaagtgaacagaagcgcaatgttgaagctgtcaagggtctacgcaaacatgagagaaaagtgaaggaactcacttaccaaactgaggaagaccgcaagaatattctcaggctccaggacctggtggacaaactgcaagcaaaggtgaaatcctacaagagacaagctgaagaagcggaggaacaatccaacgtcaacctctccaaattccgcaggatccagcacgagctggaggaggccgaggaacgggctgacattgctgagtcccaggtcaacaagctgagggtgaagagcagggaggttcacacaaaaatcataagtgaagagtaatttatctaactgctgaaaggtgaccaaagaaatgcacaaaatgtgaaaatctttgtcactccattttgtacttatgacttttggagataaaaaatttatctgccaaaaaaaaaaaaaaaaaaaa

SEQ ID NO: 54 - protein, 1939 aa, Homo sapiens
  MISC_FEATURE (1)..(1939): myosin, heavy chain 1, skeletal muscle, adult (MYH1)
MSSDSEMAIFGEAAPFLRKSERERIEAQNKPFDAKTSVFVVDPKESFVKATVQSREGGKVTAKTEAGATVTVKDDQVFPMNPPKYDKIEDMAMMTHLHEPAVLYNLKERYAAWMIYTYSGLFCVTVNPYKWLPVYNAEVVTAYRGKKRQEAPPHIFSISDNAYQFMLTDRENQSILITGESGAGKTVNTKRVIQYFATIAVTGEKKKEEVTSGKMQGTLEDQIISANPLLEAFGNAKTVRNDNSSRFGKFIRIHFGTTGKLASADIETYLLEKSRVTFQLKAERSYHIFYQIMSNKKPDLIEMLLITTNPYDYAFVSQGEITVPSIDDQEELMATDSAIEILGFTSDERVSIYKLTGAVMHYGNMKFKQKQREEQAEPDGTEVADKAAYLQNLNSADLLKALCYPRVKVGNEYVTKGQTVQQVYNAVGALAKAVYDKMFLWMVTRINQQLDTKQPRQYFIGVLDIAGFEIFDFNSLEQLCINFTNEKLQQFFNHHMFVLEQEEYKKEGIEWTFIDFGMDLAACIELIEKPMGIFSILEEECMFPKATDTSFKNKLYEQHLGKSNNFQKPKPAKGKPEAHFSLIHYAGTVDYNIAGWLDKNKDPLNETVVGLYQKSAMKTLALLFVGATGAEAEAGGGKKGGKKKGSSFQTVSALFRENLNKLMTNLRSTHPHFVRCIIPNETKTPGAMEHELVLHQLRCNGVLEGIRICRKGFPSRILYADFKQRYKVLNASAIPEGQFIDSKKASEKLLGSIDIDHTQYKFGHTKVFFKAGLLGLLEEMRDEKLAQLITRTQAMCRGFLARVEYQKMVERRESIFCIQYNVRAFMNVKHWPWMKLYFKIKPLLKSAETEKEMANMKEEFEKTKEELAKTEAKRKELEEKMVTLMQEKNDLQLQVQAEADSLADAEERCDQLIKTKIQLEAKIKEVTERAEDEEEINAELTAKKRKLEDECSELKKDIDDLELTLAKVEKEKHATENKVKNLTEEMAGLDETIAKLTKEKKALQEAHQQTLDDLQAEEDKVNTLTKAKIKLEQQVDDLEGSLEQEKKIRMDLERAKRKLEGDLKLAQESTMDIENDKQQLDEKLKKKEFEMSGLQSKIEDEQALGMQLQKKIKELQARIEELEEEIEAERASRAKAEKQRSDLSRELEEISERLEEAGGATSAQIEMNKKREAEFQKMRRDLEEATLQHEATAATLRKKHADSVAELGEQIDNLQRVKQKLEKEKSEMKMEIDDLASNMETVSKAKGNLEKMCRALEDQLSEIKTKEEEQQRLINDLTAQRARLQTESGEYSRQLDEKDTLVSQLSRGKQAFTQQIEELKRQLEEEIKAKSALAHALQSSRHDCDLLREQYEEEQEAKAELQRAMSKANSEVAQWRTKYETDAIQRTEELEEAKKKLAQRLQDAEEHVEAVNAKCASLEKTKQRLQNEVEDLMIDVERTNAACAALDKKQRNFDKILAEWKQKCEETHAELEASQKESRSLSTELFKIKNAYEESLDQLETLKRENKNLQQEISDLTEQIAEGGKRIHELEKIKKQVEQEKSELQAALEEAEASLEHEEGKILRIQLELNQVKSEVDRKIAEKDEEIDQMKRNHIRIVESMQSTLDAEIRSRNDAIRLKKKMEGDLNEMEIQLNHANRMAAEALRNYRNTQAILKDTQLHLDDALRSQEDLKEQLAMVERRANLLQAEIEELRATLEQTERSRKIAEQELLDASERVQLLHTQNTSLINTKKKLETDISQIQGEMEDIIQEARNAEEKAKKAITDAAMMAEELKKEQDTSAHLERMKKNLEQTVKDLQHRLDEAEQLALKGGKKQIQKLEARVRELEGEVESEQKRNVEAVKGLRKHERKVKELTYQTEEDRKNILRLQDLVDKLQAKVKSYKRQAEEAEEQSNVNLSKFRRIQHELEEAEERADIAESQVNKLRVKSREVHTKIISEE

SEQ ID NO: 55 - DNA, 6163 bp, Homo sapiens
  misc_feature (1)..(6163): myosin, heavy chain 2, skeletal muscle, adult (MYH2),transcript variant 1
atagctatccatataaaagagcccttggaatgaggctgactcgtcctgctttaaaaagctccaagaactgtctcactcccaggctacatcttctcacttgctaacaaggacctctgagttcagcagccatgagttcagactcagaattggctgtttttggggaggctgctcctttcctccgaaagtctgaaagggagcgcattgaggcccagaataggccctttgatgccaaaacatctgtctttgtggcggagcccaaagaatcctttgtcaaagggaccatccagagcagagaaggaggaaaagtgacggtgaagactgagggaggagcgactctgacagtgaaggatgatcaggtcttccccatgaaccctcccaaatatgacaagatcgaggatatggccatgatgactcatctgcatgagcctgctgtgctgtacaacctcaaagaacgttatgcagcctggatgatctacacctattcaggtctcttctgtgtcactgtcaacccctacaagtggctgcctgtgtataagcccgaggtggtgacagcctaccgaggcaaaaagcgccaggaggccccgccccacatcttctccatctctgacaacgcctatcagttcatgctgactgaccgagagaatcagtcaatcctgatcactggagaatctggtgcagggaagactgtgaacaccaagcgtgtcatccagtactttgcaacaattgcagttactggtgagaagaagaaggaagaaattacttctggcaaaatacaggggactctggaagatcaaatcatcagtgccaaccccctactggaggcctttggcaacgccaagaccgtgaggaatgacaactcctctcgctttggtaaattcatcagaatccactttggcactactggaaaactggcatctgctgatattgaaacatatctgctagagaagtctagagttgttttccagcttaaggctgagagaagttatcatattttttaccagattacatcgaataagaaaccagaacttattgaaatgcttctgattaccacgaacccatatgattacccatttgtcagtcaaggggagatcagtgtggccagcatcgatgatcaggaagaactgatggccacagatagtgctattgatattttgggctttactaatgaagaaaaggtctccatttacaagctcacgggggctgtgatgcattatgggaacctaaaatttaagcaaaagcagcgtgaggagcaagcagagccagatggcacagaagttgctgacaaggcggcctacctccagagtctgaactctgcagatctgctcaaagctctctgctaccccagggtcaaggtcggcaatgagtatgtcaccaaaggccagactgtagaacaggtgtccaacgcagtaggtgctctggccaaagccgtctacgagaagatgttcctgtggatggttgcccgcatcaaccagcagctggacaccaagcagcccaggcagtacttcatcggggtcttggacattgctggttttgagatttttgatttcaacagcctggagcagctgtgcatcaacttcaccaatgagaaactgcaacagtttttcaaccaccacatgttcgtgctggagcaggaggagtacaagaaggaaggcatcgagtggacgttcatcgacttcgggatggacctggctgcctgcatcgagctcatcgagaagcctatgggcatcttctccatcctggaagaggagtgcatgttccctaaggcaacagacacctccttcaagaacaagctgtatgaccagcacctgggcaagtctgccaacttccagaagcccaaggtggtcaaaggcaaggccgaggcccacttcgctctgattcactatgctggtgttgtggactacaacattactggctggctggagaagaacaaggaccccctgaatgagaccgtggttggactgtaccagaagtctgcaatgaaaactctagctcagctcttctctggggctcaaactgctgaaggagagggagctggtggaggggccaagaaaggtggtaagaagaagggctcttctttccagacagtgtctgcccttttcagagagaatttgaacaagctgatgaccaacctcaggagtacccatcctcactttgtgaggtgtatcatccccaatgagacaaaaactcctggtgccatggagcatgagcttgtcctccaccagctgaggtgtaacggtgtgctggaaggcatccgcatctgtaggaaaggatttccaagcagaatcctttatgcagacttcaaacagagatacaaggtattaaatgcaagtgcaatccctgaagggcaattcattgatagcaagaaggcctctgagaagctccttgcatccatcgacattgaccacacccagtataaatttgggcacaccaaggtctttttcaaagctggtcttctggggctcctagaggagatgcgagatgacaagctggcccagctgattacccgaacccaggccaggtgcagagggttcttggcaagagtggagtaccagaggatggtggagagaagggaggccatcttctgtatccagtacaatatcagatccttcatgaatgtcaagcactggccctggatgaaactcttcttcaagatcaagcctctgttgaagagtgcagaaactgagaaggagatggccaccatgaaggaagaatttcagaaaattaaagacgaacttgccaagtcagaggcaaaaaggaaggaactggaagaaaagatggtgacgctgttgaaagaaaaaaatgacttgcagctccaagttcaggctgaagccgaaggcttggctgatgcagaggaaaggtgtgaccagctaatcaaaaccaaaatccagctagaagccaaaatcaaagaggtgactgagagagctgaggatgaggaagagatcaatgctgagctgacagccaagaagaggaaactggaggatgaatgttcagaactcaagaaagacattgatgaccttgagctgacactggccaaggttgagaaggagaaacatgccacagaaaacaaggtgaaaaacctcacagaagagatggcaggtctggatgaaaccattgctaagctgaccaaggagaagaaggctctccaggaggcccaccagcagaccctggatgacctgcaggcagaggaggacaaagtcaacaccctgaccaaagctaaaatcaaacttgaacaacaagtggatgatcttgaagggtccttggagcaagaaaagaaacttcgcatggacctagaaagggctaagaggaaacttgagggtgacttgaagttggcccaagaatccataatggacattgaaaatgagaaacagcaacttgatgaaaagctcaaaaagaaagagtttgaaatcagcaatctgcaaagcaagattgaagatgaacaggcacttggcattcaattgcagaagaaaattaaagaattgcaagcccgcattgaggagctggaggaggaaatcgaggcagagcgggcctcccgggccaaagcagagaagcagcgctctgacctctcccgggagctggaggagatcagcgagaggctggaagaagccggtggggccacttcagcccagattgagatgaacaagaagcgggaggctgagttccagaaaatgcgcagggacctggaggaggccaccctacagcatgaagccacagcggccaccctgaggaagaagcatgcagatagtgtggccgagcttggggagcagattgacaacctgcagcgagtgaagcagaagctggagaaggagaagagtgagatgaagatggagattgatgaccttgctagtaatgtagaaacggtctccaaagccaagggaaacctagagaaaatgtgccggactctagaggaccaactgagtgaactgaaatcaaaggaagaggagcagcagcggctgatcaatgacctgactgcgcagagggggcgcctgcagactgaatctggtgagttttcacgccagcttgatgaaaaggaagctctggtgtctcagttatcaagaggcaaacaagcctttactcaacagattgaagaattaaagaggcaacttgaagaggagataaaagccaagaacgccctggcgcatgccctgcagtcttcccgccacgactgtgacctgctgcgggaacagtatgaggaggagcaggaatccaaggccgagctgcagagagcactgtccaaggccaacaccgaggttgcccaatggaggaccaaatacgagacggacgccatccagcgcacagaggagctggaggaggccaagaagaagctggcccagcggctgcaggcagctgaggaacatgtagaagctgtgaacgccaaatgtgcttccctcgaaaagacgaagcagcggctgcagaatgaggtcgaggacctcatgcttgatgtggagaggacaaatgccgcctgtgccgcccttgacaaaaagcaaaggaacttcgataagatcctggcagaatggaaacagaaatgtgaggaaacgcatgctgagcttgaggcctcccagaaggaggcccgttcccttggcactgagctgttcaagataaagaatgcctatgaggaatctttggatcagctagaaaccctgaagcgagagaacaaaaacttacagcaggagatttctgacctcacggaacagattgcagaaggagggaaacgtatccatgaactggagaaaataaagaaacaagtggaacaagaaaagtgtgaacttcaggctgctttagaagaagcagaggcatctcttgaacatgaagagggaaagatcctgcgcatccagcttgagttgaaccaagtcaagtctgaggttgataggaaaattgctgaaaaagatgaggaaattgaccagctgaagagaaaccacattagaatcgtggagtccatgcagagcacgctggatgctgagatcaggagtaggaatgatgccattaggctcaagaagaagatggagggagacctcaatgaaatggaaatccagctgaaccatgccaaccgcatggctgctgaggccctgaggaactacaggaacacccaaggcatcctcaaggatacccagatccacctggatgatgctctccggagccaggaggacctgaaggaacagctggccatggtggagcgcagagccaacctgctgcaggctgagatcgaggagctgcgggccactctggaacagacagagaggagcagaaaaatcgcagaacaggagctcctggatgccagtgagcgtgttcagctactgcacacccagaacaccagcctgatcaacaccaagaagaagctggagacagatatttcccaaatgcaaggagagatggaggacattctccaggaagcccgcaatgcagaagaaaaggccaagaaggccatcactgatgccgccatgatggctgaggagctgaagaaggagcaggacaccagcgcccacctggagcggatgaagaagaacatggagcagaccgtgaaggatctgcagctccgtctggatgaggctgagcagctggccctgaagggtgggaagaagcagatccagaaactggaggccagggtacgggagctggaaggagaggttgagagtgagcaaaagcgtaatgctgaggctgtcaaaggtctgcgcaaacatgagaggcgagtgaaggaactcacttaccagacggaagaagatagaaagaatattctcaggcttcaagatttggtagataaacttcaggcaaaagtgaaatcttataagagacaagctgaggaggctgaggaacaatccaacaccaatctagctaaattccgcaagctccagcatgagctggaggaggccgaggaacgggctgacattgctgagtcccaggtgaacaaactgcgggtgaagagccgggaggttcacacaaaagtcataagtgaagagtgatcatgtcctgatgccatggaatgactgaagacaggcacaaaatgtgacatctttggtcatttccctctgtaattattgtgtattctaccctgttgcaaaggaaataaagcatagggtagtttgcaaacaataaaaaaaaaaaaaaaaaaaaaaaaaaaaaaaaaaaaaaaaaaaaaaaaaaaaaaaaaaaaaaaaaaaaaaaaaaaaaa

SEQ ID NO: 56 - protein, 1941 aa, Homo sapiens
  MISC_FEATURE (1)..(1941): myosin, heavy chain 2, skeletal muscle, adult (MYH2),transcript variant 1
MSSDSELAVFGEAAPFLRKSERERIEAQNRPFDAKTSVFVAEPKESFVKGTIQSREGGKVTVKTEGGATLTVKDDQVFPMNPPKYDKIEDMAMMTHLHEPAVLYNLKERYAAWMIYTYSGLFCVTVNPYKWLPVYKPEVVTAYRGKKRQEAPPHIFSISDNAYQFMLTDRENQSILITGESGAGKTVNTKRVIQYFATIAVTGEKKKEEITSGKIQGTLEDQIISANPLLEAFGNAKTVRNDNSSRFGKFIRIHFGTTGKLASADIETYLLEKSRVVFQLKAERSYHIFYQITSNKKPELIEMLLITTNPYDYPFVSQGEISVASIDDQEELMATDSAIDILGFTNEEKVSIYKLTGAVMHYGNLKFKQKQREEQAEPDGTEVADKAAYLQSLNSADLLKALCYPRVKVGNEYVTKGQTVEQVSNAVGALAKAVYEKMFLWMVARINQQLDTKQPRQYFIGVLDIAGFEIFDFNSLEQLCINFTNEKLQQFFNHHMFVLEQEEYKKEGIEWTFIDFGMDLAACIELIEKPMGIFSILEEECMFPKATDTSFKNKLYDQHLGKSANFQKPKVVKGKAEAHFALIHYAGVVDYNITGWLEKNKDPLNETVVGLYQKSAMKTLAQLFSGAQTAEGEGAGGGAKKGGKKKGSSFQTVSALFRENLNKLMTNLRSTHPHFVRCIIPNETKTPGAMEHELVLHQLRCNGVLEGIRICRKGFPSRILYADFKQRYKVLNASAIPEGQFIDSKKASEKLLASIDIDHTQYKFGHTKVFFKAGLLGLLEEMRDDKLAQLITRTQARCRGFLARVEYQRMVERREAIFCIQYNIRSFMNVKHWPWMKLFFKIKPLLKSAETEKEMATMKEEFQKIKDELAKSEAKRKELEEKMVTLLKEKNDLQLQVQAEAEGLADAEERCDQLIKTKIQLEAKIKEVTERAEDEEEINAELTAKKRKLEDECSELKKDIDDLELTLAKVEKEKHATENKVKNLTEEMAGLDETIAKLTKEKKALQEAHQQTLDDLQAEEDKVNTLTKAKIKLEQQVDDLEGSLEQEKKLRMDLERAKRKLEGDLKLAQESIMDIENEKQQLDEKLKKKEFEISNLQSKIEDEQALGIQLQKKIKELQARIEELEEEIEAERASRAKAEKQRSDLSRELEEISERLEEAGGATSAQIEMNKKREAEFQKMRRDLEEATLQHEATAATLRKKHADSVAELGEQIDNLQRVKQKLEKEKSEMKMEIDDLASNVETVSKAKGNLEKMCRTLEDQLSELKSKEEEQQRLINDLTAQRGRLQTESGEFSRQLDEKEALVSQLSRGKQAFTQQIEELKRQLEEEIKAKNALAHALQSSRHDCDLLREQYEEEQESKAELQRALSKANTEVAQWRTKYETDAIQRTEELEEAKKKLAQRLQAAEEHVEAVNAKCASLEKTKQRLQNEVEDLMLDVERTNAACAALDKKQRNFDKILAEWKQKCEETHAELEASQKEARSLGTELFKIKNAYEESLDQLETLKRENKNLQQEISDLTEQIAEGGKRIHELEKIKKQVEQEKCELQAALEEAEASLEHEEGKILRIQLELNQVKSEVDRKIAEKDEEIDQLKRNHIRIVESMQSTLDAEIRSRNDAIRLKKKMEGDLNEMEIQLNHANRMAAEALRNYRNTQGILKDTQIHLDDALRSQEDLKEQLAMVERRANLLQAEIEELRATLEQTERSRKIAEQELLDASERVQLLHTQNTSLINTKKKLETDISQMQGEMEDILQEARNAEEKAKKAITDAAMMAEELKKEQDTSAHLERMKKNMEQTVKDLQLRLDEAEQLALKGGKKQIQKLEARVRELEGEVESEQKRNAEAVKGLRKHERRVKELTYQTEEDRKNILRLQDLVDKLQAKVKSYKRQAEEAEEQSNTNLAKFRKLQHELEEAEERADIAESQVNKLRVKSREVHTKVISEE

SEQ ID NO: 57 - DNA, 6163 bp, Homo sapiens
  misc_feature (1)..(6163): myosin, heavy chain 2, skeletal muscle, adult (MYH2),transcript variant 2
aggacgggcctttcaagagggacactggtcacaccgcccagtgtcagcagcagctgctagttctgaactgtctcactcccaggctacatcttctcacttgctaacaaggacctctgagttcagcagccatgagttcagactcagaattggctgtttttggggaggctgctcctttcctccgaaagtctgaaagggagcgcattgaggcccagaataggccctttgatgccaaaacatctgtctttgtggcggagcccaaagaatcctttgtcaaagggaccatccagagcagagaaggaggaaaagtgacggtgaagactgagggaggagcgactctgacagtgaaggatgatcaggtcttccccatgaaccctcccaaatatgacaagatcgaggatatggccatgatgactcatctgcatgagcctgctgtgctgtacaacctcaaagaacgttatgcagcctggatgatctacacctattcaggtctcttctgtgtcactgtcaacccctacaagtggctgcctgtgtataagcccgaggtggtgacagcctaccgaggcaaaaagcgccaggaggccccgccccacatcttctccatctctgacaacgcctatcagttcatgctgactgaccgagagaatcagtcaatcctgatcactggagaatctggtgcagggaagactgtgaacaccaagcgtgtcatccagtactttgcaacaattgcagttactggtgagaagaagaaggaagaaattacttctggcaaaatacaggggactctggaagatcaaatcatcagtgccaaccccctactggaggcctttggcaacgccaagaccgtgaggaatgacaactcctctcgctttggtaaattcatcagaatccactttggcactactggaaaactggcatctgctgatattgaaacatatctgctagagaagtctagagttgttttccagcttaaggctgagagaagttatcatattttttaccagattacatcgaataagaaaccagaacttattgaaatgcttctgattaccacgaacccatatgattacccatttgtcagtcaaggggagatcagtgtggccagcatcgatgatcaggaagaactgatggccacagatagtgctattgatattttgggctttactaatgaagaaaaggtctccatttacaagctcacgggggctgtgatgcattatgggaacctaaaatttaagcaaaagcagcgtgaggagcaagcagagccagatggcacagaagttgctgacaaggcggcctacctccagagtctgaactctgcagatctgctcaaagctctctgctaccccagggtcaaggtcggcaatgagtatgtcaccaaaggccagactgtagaacaggtgtccaacgcagtaggtgctctggccaaagccgtctacgagaagatgttcctgtggatggttgcccgcatcaaccagcagctggacaccaagcagcccaggcagtacttcatcggggtcttggacattgctggttttgagatttttgatttcaacagcctggagcagctgtgcatcaacttcaccaatgagaaactgcaacagtttttcaaccaccacatgttcgtgctggagcaggaggagtacaagaaggaaggcatcgagtggacgttcatcgacttcgggatggacctggctgcctgcatcgagctcatcgagaagcctatgggcatcttctccatcctggaagaggagtgcatgttccctaaggcaacagacacctccttcaagaacaagctgtatgaccagcacctgggcaagtctgccaacttccagaagcccaaggtggtcaaaggcaaggccgaggcccacttcgctctgattcactatgctggtgttgtggactacaacattactggctggctggagaagaacaaggaccccctgaatgagaccgtggttggactgtaccagaagtctgcaatgaaaactctagctcagctcttctctggggctcaaactgctgaaggagagggagctggtggaggggccaagaaaggtggtaagaagaagggctcttctttccagacagtgtctgcccttttcagagagaatttgaacaagctgatgaccaacctcaggagtacccatcctcactttgtgaggtgtatcatccccaatgagacaaaaactcctggtgccatggagcatgagcttgtcctccaccagctgaggtgtaacggtgtgctggaaggcatccgcatctgtaggaaaggatttccaagcagaatcctttatgcagacttcaaacagagatacaaggtattaaatgcaagtgcaatccctgaagggcaattcattgatagcaagaaggcctctgagaagctccttgcatccatcgacattgaccacacccagtataaatttgggcacaccaaggtctttttcaaagctggtcttctggggctcctagaggagatgcgagatgacaagctggcccagctgattacccgaacccaggccaggtgcagagggttcttggcaagagtggagtaccagaggatggtggagagaagggaggccatcttctgtatccagtacaatatcagatccttcatgaatgtcaagcactggccctggatgaaactcttcttcaagatcaagcctctgttgaagagtgcagaaactgagaaggagatggccaccatgaaggaagaatttcagaaaattaaagacgaacttgccaagtcagaggcaaaaaggaaggaactggaagaaaagatggtgacgctgttgaaagaaaaaaatgacttgcagctccaagttcaggctgaagccgaaggcttggctgatgcagaggaaaggtgtgaccagctaatcaaaaccaaaatccagctagaagccaaaatcaaagaggtgactgagagagctgaggatgaggaagagatcaatgctgagctgacagccaagaagaggaaactggaggatgaatgttcagaactcaagaaagacattgatgaccttgagctgacactggccaaggttgagaaggagaaacatgccacagaaaacaaggtgaaaaacctcacagaagagatggcaggtctggatgaaaccattgctaagctgaccaaggagaagaaggctctccaggaggcccaccagcagaccctggatgacctgcaggcagaggaggacaaagtcaacaccctgaccaaagctaaaatcaaacttgaacaacaagtggatgatcttgaagggtccttggagcaagaaaagaaacttcgcatggacctagaaagggctaagaggaaacttgagggtgacttgaagttggcccaagaatccataatggacattgaaaatgagaaacagcaacttgatgaaaagctcaaaaagaaagagtttgaaatcagcaatctgcaaagcaagattgaagatgaacaggcacttggcattcaattgcagaagaaaattaaagaattgcaagcccgcattgaggagctggaggaggaaatcgaggcagagcgggcctcccgggccaaagcagagaagcagcgctctgacctctcccgggagctggaggagatcagcgagaggctggaagaagccggtggggccacttcagcccagattgagatgaacaagaagcgggaggctgagttccagaaaatgcgcagggacctggaggaggccaccctacagcatgaagccacagcggccaccctgaggaagaagcatgcagatagtgtggccgagcttggggagcagattgacaacctgcagcgagtgaagcagaagctggagaaggagaagagtgagatgaagatggagattgatgaccttgctagtaatgtagaaacggtctccaaagccaagggaaacctagagaaaatgtgccggactctagaggaccaactgagtgaactgaaatcaaaggaagaggagcagcagcggctgatcaatgacctgactgcgcagagggggcgcctgcagactgaatctggtgagttttcacgccagcttgatgaaaaggaagctctggtgtctcagttatcaagaggcaaacaagcctttactcaacagattgaagaattaaagaggcaacttgaagaggagataaaagccaagaacgccctggcgcatgccctgcagtcttcccgccacgactgtgacctgctgcgggaacagtatgaggaggagcaggaatccaaggccgagctgcagagagcactgtccaaggccaacaccgaggttgcccaatggaggaccaaatacgagacggacgccatccagcgcacagaggagctggaggaggccaagaagaagctggcccagcggctgcaggcagctgaggaacatgtagaagctgtgaacgccaaatgtgcttccctcgaaaagacgaagcagcggctgcagaatgaggtcgaggacctcatgcttgatgtggagaggacaaatgccgcctgtgccgcccttgacaaaaagcaaaggaacttcgataagatcctggcagaatggaaacagaaatgtgaggaaacgcatgctgagcttgaggcctcccagaaggaggcccgttcccttggcactgagctgttcaagataaagaatgcctatgaggaatctttggatcagctagaaaccctgaagcgagagaacaaaaacttacagcaggagatttctgacctcacggaacagattgcagaaggagggaaacgtatccatgaactggagaaaataaagaaacaagtggaacaagaaaagtgtgaacttcaggctgctttagaagaagcagaggcatctcttgaacatgaagagggaaagatcctgcgcatccagcttgagttgaaccaagtcaagtctgaggttgataggaaaattgctgaaaaagatgaggaaattgaccagctgaagagaaaccacattagaatcgtggagtccatgcagagcacgctggatgctgagatcaggagtaggaatgatgccattaggctcaagaagaagatggagggagacctcaatgaaatggaaatccagctgaaccatgccaaccgcatggctgctgaggccctgaggaactacaggaacacccaaggcatcctcaaggatacccagatccacctggatgatgctctccggagccaggaggacctgaaggaacagctggccatggtggagcgcagagccaacctgctgcaggctgagatcgaggagctgcgggccactctggaacagacagagaggagcagaaaaatcgcagaacaggagctcctggatgccagtgagcgtgttcagctactgcacacccagaacaccagcctgatcaacaccaagaagaagctggagacagatatttcccaaatgcaaggagagatggaggacattctccaggaagcccgcaatgcagaagaaaaggccaagaaggccatcactgatgccgccatgatggctgaggagctgaagaaggagcaggacaccagcgcccacctggagcggatgaagaagaacatggagcagaccgtgaaggatctgcagctccgtctggatgaggctgagcagctggccctgaagggtgggaagaagcagatccagaaactggaggccagggtacgggagctggaaggagaggttgagagtgagcaaaagcgtaatgctgaggctgtcaaaggtctgcgcaaacatgagaggcgagtgaaggaactcacttaccagacggaagaagatagaaagaatattctcaggcttcaagatttggtagataaacttcaggcaaaagtgaaatcttataagagacaagctgaggaggctgaggaacaatccaacaccaatctagctaaattccgcaagctccagcatgagctggaggaggccgaggaacgggctgacattgctgagtcccaggtgaacaaactgcgggtgaagagccgggaggttcacacaaaagtcataagtgaagagtgatcatgtcctgatgccatggaatgactgaagacaggcacaaaatgtgacatctttggtcatttccctctgtaattattgtgtattctaccctgttgcaaaggaaataaagcatagggtagtttgcaaacaataaaaaaaaaaaaaaaaaaaaaaaaaaaaaaaaaaaaaaaaaaaaaaaaaaaaaaaaaaaaaaaaaaaaaaaaaaaaaa

SEQ ID NO: 58 - protein, 1941 aa, Homo sapiens; identical to SEQ ID NO: 56
  MISC_FEATURE (1)..(1941): myosin, heavy chain 2, skeletal muscle, adult (MYH2),transcript variant 2

SEQ ID NO: 59 - DNA, 6037 bp, Homo sapiens
  misc_feature (1)..(6037): myosin, heavy chain 3, skeletal muscle, embryonic,(MYH3)
gtgggcggaggtctgggatctcctggctgttgctgtcttctgctctcatcctgcaggtgggactctcagctgacaccatgagtagtgacactgaaatggaagtgttcggcatagctgctcctttcctccggaagtcagaaaaggagaggatcgaggctcagaaccagccctttgatgccaagacgtattgcttcgtggtggactcaaaggaagaatatgccaaggggaaaatcaagagttctcaggatgggaaggtcactgtggaaactgaggacaacaggaccctggtggtcaaaccagaggatgtgtacgccatgaacccccccaagttcgacaggatcgaagacatggccatgctgacgcacctgaatgagccagccgtgctgtacaacctgaaggaccgttacacatcttggatgatctatacctactcaggcctcttctgtgtcactgtcaacccctacaagtggctgccggtgtacaaccccgaggtggtggaaggctaccgaggcaaaaagcgccaggaggccccaccccacatcttctccatctctgacaacgcctatcagttcatgctgactgatcgtgaaaaccagtccattctgatcaccggagaatccggggcaggaaagactgtgaacaccaaacgggtcatccagtactttgcaacaattgcagctactggggacctggccaagaagaaggactccaaaatgaaggggactctggaagatcaaatcatcagtgccaatcccctgctggaggcctttgggaacgccaagactgtgaggaatgacaactcctcccgttttggcaagttcatccgaatccattttggaaccactgggaagctggcctctgcagatattgaaacttatcttctggaaaaatcaagagtcactttccagctgaaggctgaaagaagctaccacatcttctaccagattctttctaacaagaagcctgagctcatagagctgctgcttattacgaccaacccttacgactacccgttcattagccagggggagatcctggtggccagcatagatgatgcagaggagctgctggctacagacagcgccattgacatcctgggcttcaccccagaagagaaatctgggctctacaagctgacgggagccgtgatgcactacgggaacatgaagttcaagcagaagcagcgagaggagcaggccgagccggatggcacagaagtggctgacaaaacagcctatctgatgggcctgaactcttcggacctcctaaaagctttgtgctttcctagagtgaaagttgggaatgagtacgttaccaaaggtcaaactgtggatcaggttcaccatgctgtgaatgctctttcaaaatcagtttatgaaaagttgttcttgtggatggtcactcgcattaaccagcaactggatacgaagcttccaagacaacacttcattggtgttttggacattgcaggctttgaaatctttgagtataacagcctggagcagctgtgcatcaacttcaccaatgagaaactgcaacagtttttcaaccaccacatgttcgtgctggagcaggaggagtacaagaaggaaggcatcgagtggacgttcattgacttcgggatggacctggctgcctgcatcgagctcatcgagaagcctatgggcatcttctccatcctggaagaggagtgcatgttccccaaggcaacagacacctccttcaagaacaagctgtatgaccagcatcttggaaagtccaacaacttccagaagcccaaggtggtcaaaggcagggccgaggctcacttctcactgatccactatgcgggcaccgtggactacagtgtctcaggttggctggagaagaacaaggaccctctgaacgagactgtggttgggctgtaccagaagtcttccaacaggctcctggcacacctctatgccacgtttgccacggcggatgctgacagtggaaagaagaaagttgccaagaagaagggttcttccttccaaactgtctctgcccttttcagggaaaacctgaacaagctgatgtcaaatttaagaactactcaccctcattttgtgcgttgtataattcccaatgaaaccaaaactccaggggctatggaacacagccttgttctgcaccagctgcggtgtaacggtgtcctggagggcatccgcatctgcaggaaagggttcccaaacaggattctctatggcgattttaaacaaagataccgagtgctgaatgccagtgcaatccctgagggacaattcattgacagcaagaaagcctgtgaaaagcttctggcatccattgatattgaccacactcagtacaaatttggacataccaaggtgttcttcaaggctggcttgctgggaaccctggaagagatgcgggatgaccgcctggccaaactaatcacccggacacaagctgtgtgcagagggttcctcatgcgtgtggaattccagaagatggtgcagaggagggagtccatcttctgcatccagtacaacattcgctcattcatgaacgtcaagcactggccctggatgaaactcttcttcaagatcaagcccctcctcaagagtgcagagactgagaaagagatggccaccatgaaggaagaattccagaaaaccaaagatgaactcgccaagtcggaggcaaaaaggaaggagctagaggaaaaactggtgactctggtccaagagaagaatgacctgcagctccaagtacaagctgaaagcgaaaatttgttggatgctgaggaaagatgcgatcagctgatcaaagccaaattccagctcgaggccaagatcaaggaggtgacagagagagctgaagatgaggaggagatcaatgctgagctgacggccaagaagaggaaactggaggatgaatgctcagagctcaagaaagacattgatgaccttgagttgaccctggccaaggttgagaaggagaagcatgccacagagaacaaggttaaaaaccttactgaggaactctctgggttagatgaaacaattgcaaagttaaccagagagaagaaggccctccaagaggcgcaccagcaggccttggatgacctccaagctgaagaagacaaagtcaattctttgaacaaaaccaagagcaaactggaacagcaagtggaagacctggaaagctccctagaacaagaaaagaagctccgagtagacctggaaaggaacaaaaggaaattggaaggagacttgaagcttgctcaagagtccatattagatctggagaatgacaagcaacagctggacgaaaggctcaagaagaaagattttgaatattgtcaacttcaaagcaaagtggaagatgagcagacactgggcctccagtttcagaagaaaatcaaagagttgcaggctcgaattgaggagctggaagaggagatagaggcggagagggccacccgcgcgaagacagagaaacagcgcagcgactatgcccgggagctggaggagctgagcgagcggctggaggaggcgggaggcgtcacctccacgcagatagagctcaacaagaagcgggaggcggagttcctgaagctgcgcagggacctggaggaggccacactgcagcacgaagccatggtggccgcgctgaggaagaagcatgcggatagtgtggccgagcttggggagcagattgacaacctgcagcgggtcaagcagaagctggagaaggagaagagcgagttcaagctggagatcgatgacctctccagcagcatggagagtgtgtcgaaatctaaggcaaatctggaaaaaatctgccgaaccctggaggatcagttaagtgaggccaggggcaagaatgaggaaattcagaggagcctgagcgagctgaccacacagaagtctcgtttgcagaccgaggctggtgagctgagtcgtcagctggaagaaaaagaaagcatagtatcccaactttccaggagcaagcaagcctttacccagcaaacagaagagctcaagaggcagctggaggaagagaacaaggccaagaacgccctggcgcacgccctgcagtcctcccgccacgactgtgacctgctgcgggaacagtatgaggaggagcaggaaggcaaagctgagctgcagagggcgctgtccaaggccaatagtgaggttgcccagtggagaaccaaatacgagacggacgccatccagcgcacagaagagctggaggaggccaagaaaaaacttgctcagcgccttcaagattccgaggaacaggttgaggcagtgaatgctaaatgtgcttcactggagaagaccaagcagaggctgcaaggagaggtggaggatctgatggttgatgttgaaagagccaattccttggccgccgctctggacaagaagcagaggaactttgacaaggtgttggcagagtggaagacaaagtgtgaggagagccaagcagagctggaggcatccctgaaggagtcccgctccttgagcactgagctcttcaaactgaaaaatgcctacgaggaagccttagatcaacttgaaactgtgaaacgggaaaataagaacttagagcaggagatagcagatctcacagaacaaattgctgaaaatggcaaaaccatccatgaactggagaaatcaagaaagcagattgagctggaaaaggctgatatccagctggctctcgaggaagcagaggctgctcttgagcatgaagaagccaagatcctccgaatccagcttgaattgacacaagtgaaatcagaaattgatagaaagatcgccgagaaggatgaagagatcgagcagctgaagaggaactaccagagaacagtggaaaccatgcagagcgccctggacgccgaggtgcggagcaggaatgaagccatccggctcaagaagaagatggagggggacctgaatgaaatcgagatccagctgagccacgccaaccgccaggcggcggagaccctcaaacacctcaggagtgtccagggacagctgaaggatacgcagctccacctggatgatgccctccggggccaggaggacctgaaggagcagctggcgattgtggagcgcagagccaacctgctgcaggccgaggtggaggagctgcgggctactctggagcagacggagagggcccggaaactggcggaacaggagctcctggactccaacgagagggtgcagctgctgcatacccagaacaccagcctcatccacaccaagaagaagctggagacagacctcatgcagctccagagtgaggtagaagatgccagcagggatgcaaggaacgctgaggagaaggccaagaaggccatcacggacgctgccatgatggcggaggagctgaagaaggagcaggacaccagcgcccaccttgagcggatgaagaagaacctggaacagacggtgaaggacctgcagcatcgtctagatgaggccgagcagctggcgctgaagggcgggaagaagcagatccagaaactggagaccaggatccgagagctggagtttgaacttgagggagagcagaagaagaacacagagtctgttaagggcctgaggaagtatgagcggagggtcaaggagctgacgtaccagagtgaagaggacaggaagaatgtgctgagattgcaggatctggtggataaactgcaagtgaaagtcaagtcctacaagaggcaggcggaggaggctgatgaacaagccaatgctcatctcaccaaattccgaaaggctcagcatgagctggaggaggccgaggaacgtgcggatatcgcagaatctcaagtcaacaagctccgcgctaagactcgagacttcacctccagcaggatggtggtccacgagagtgaagagtgagccagcccttctggagcaggacagaagatatgcaaaatgtatattttcttgattcctgaccattgatacttaatgtccatgtgactctttttcacatgcaataaactttgctttgtttcaatctgggaaaaaaaaaa

SEQ ID NO: 60 - protein, 1940 aa, Homo sapiens
  MISC_FEATURE (1)..(1940): myosin, heavy chain 3, skeletal muscle, embryonic,(MYH3)
MSSDTEMEVFGIAAPFLRKSEKERIEAQNQPFDAKTYCFVVDSKEEYAKGKIKSSQDGKVTVETEDNRTLVVKPEDVYAMNPPKFDRIEDMAMLTHLNEPAVLYNLKDRYTSWMIYTYSGLFCVTVNPYKWLPVYNPEVVEGYRGKKRQEAPPHIFSISDNAYQFMLTDRENQSILITGESGAGKTVNTKRVIQYFATIAATGDLAKKKDSKMKGTLEDQIISANPLLEAFGNAKTVRNDNSSRFGKFIRIHFGTTGKLASADIETYLLEKSRVTFQLKAERSYHIFYQILSNKKPELIELLLITTNPYDYPFISQGEILVASIDDAEELLATDSAIDILGFTPEEKSGLYKLTGAVMHYGNMKFKQKQREEQAEPDGTEVADKTAYLMGLNSSDLLKALCFPRVKVGNEYVTKGQTVDQVHHAVNALSKSVYEKLFLWMVTRINQQLDTKLPRQHFIGVLDIAGFEIFEYNSLEQLCINFTNEKLQQFFNHHMFVLEQEEYKKEGIEWTFIDFGMDLAACIELIEKPMGIFSILEEECMFPKATDTSFKNKLYDQHLGKSNNFQKPKVVKGRAEAHFSLIHYAGTVDYSVSGWLEKNKDPLNETVVGLYQKSSNRLLAHLYATFATADADSGKKKVAKKKGSSFQTVSALFRENLNKLMSNLRTTHPHFVRCIIPNETKTPGAMEHSLVLHQLRCNGVLEGIRICRKGFPNRILYGDFKQRYRVLNASAIPEGQFIDSKKACEKLLASIDIDHTQYKFGHTKVFFKAGLLGTLEEMRDDRLAKLITRTQAVCRGFLMRVEFQKMVQRRESIFCIQYNIRSFMNVKHWPWMKLFFKIKPLLKSAETEKEMATMKEEFQKTKDELAKSEAKRKELEEKLVTLVQEKNDLQLQVQAESENLLDAEERCDQLIKAKFQLEAKIKEVTERAEDEEEINAELTAKKRKLEDECSELKKDIDDLELTLAKVEKEKHATENKVKNLTEELSGLDETIAKLTREKKALQEAHQQALDDLQAEEDKVNSLNKTKSKLEQQVEDLESSLEQEKKLRVDLERNKRKLEGDLKLAQESILDLENDKQQLDERLKKKDFEYCQLQSKVEDEQTLGLQFQKKIKELQARIEELEEEIEAERATRAKTEKQRSDYARELEELSERLEEAGGVTSTQIELNKKREAEFLKLRRDLEEATLQHEAMVAALRKKHADSVAELGEQIDNLQRVKQKLEKEKSEFKLEIDDLSSSMESVSKSKANLEKICRTLEDQLSEARGKNEEIQRSLSELTTQKSRLQTEAGELSRQLEEKESIVSQLSRSKQAFTQQTEELKRQLEEENKAKNALAHALQSSRHDCDLLREQYEEEQEGKAELQRALSKANSEVAQWRTKYETDAIQRTEELEEAKKKLAQRLQDSEEQVEAVNAKCASLEKTKQRLQGEVEDLMVDVERANSLAAALDKKQRNFDKVLAEWKTKCEESQAELEASLKESRSLSTELFKLKNAYEEALDQLETVKRENKNLEQEIADLTEQIAENGKTIHELEKSRKQIELEKADIQLALEEAEAALEHEEAKILRIQLELTQVKSEIDRKIAEKDEEIEQLKRNYQRTVETMQSALDAEVRSRNEAIRLKKKMEGDLNEIEIQLSHANRQAAETLKHLRSVQGQLKDTQLHLDDALRGQEDLKEQLAIVERRANLLQAEVEELRATLEQTERARKLAEQELLDSNERVQLLHTQNTSLIHTKKKLETDLMQLQSEVEDASRDARNAEEKAKKAITDAAMMAEELKKEQDTSAHLERMKKNLEQTVKDLQHRLDEAEQLALKGGKKQIQKLETRIRELEFELEGEQKKNTESVKGLRKYERRVKELTYQSEEDRKNVLRLQDLVDKLQVKVKSYKRQAEEADEQANAHLTKFRKAQHELEEAEERADIAESQVNKLRAKTRDFTSSRMVVHESEE

SEQ ID NO: 61 - DNA, 6016 bp, Homo sapiens
  misc_feature (1)..(6016): myosin, heavy chain 4, skeletal muscle (MYH4)
atccttcctcaaaattcttgaagtagttgtctgctttgagcctgccaccttcttcatctgataatacaagaggtatacctagtccagtactgccatcaataacctgcagccatgagttctgactctgagatggccatttttggggaggctgctcctttcctccgaaagtctgaaaaggagcgaattgaagctcagaacaagccttttgatgccaagacatcagtctttgtggtggaccctaaggagtcctacgtgaaagcaatagtgcagagcagggaaggggggaaggtgacagccaagaccgaagctggagctactgtaactgtgaaagaagaccaagtcttctccatgaaccctcccaaatatgacaagatcgaggacatggccatgatgactcacctgcatgagcctgctgtgctgtataacctcaaagagcgttacgcagcctggatgatctacacctactcgggcctcttctgtgtcaccgtcaacccctacaagtggctgccggtgtacaaccctgaggtggtgacagcctaccgaggcaaaaagcgccaggaggccccaccccatatcttctccatctctgacaatgcctatcagttcatgctaactgatcgtgaaaaccagtcaatcttgattactggagaatctggtgcagggaagactgtgaacacgaagcgtgtcatccagtactttgcaacaattgcagttactggagagaagaaaaaagaggaacctgcctctggcaaaatgcaggggacccttgaagatcaaatcatcagtgctaaccccctactggaagccttcggcaatgccaagaccgtgaggaatgacaactcctctcgctttggtaaattcatcaggatccattttggtgccacaggcaaactggcttctgcagatattgaaacatatctgctagagaagtcccgagttacttttcagctaaaggctgaaagaagctaccacatattttatcaaatcctgtccaataagaaaccagagctcattgaaatgcttctgatcaccaccaacccatatgacttcgcatttgtcagccaaggggaaattactgtgcccagcattgatgaccaggaagagctgatggccacagatagtgctgtggacatcctgggtttcactgctgatgaaaaggtggccatttacaagctcactggagccgtgatgcattatgggaacatgaaattcaagcaaaagcaaagggaagagcaggcagagccagatggcacggaagttgctgacaaagctgcttatctgacaagtctgaactctgctgacctgctcaaatctctctgctatcccagagtcaaggtcggcaatgagttcgtaaccaaaggccagactgtgcagcaggtgtacaatgcagtgggtgctctggccaaagccatctacgagaagatgttcctgtggatggtcacccgcatcaaccagcagctggacaccaagcagcccaggcagtacttcatcggggtcttggacattgctggctttgagatctttgatttcaacagcctggagcagctgtgcatcaacttcaccaacgagaaactgcaacagtttttcaaccaccacatgttcgtgctggagcaggaagagtacaagaaggaaggcatcgagtgggagttcattgacttcgggatggacctggctgcctgcatcgagctcatcgagaagcctatgggcatcttctccatcctagaagaggagtgcatgttccccaaggcaacagacacctccttcaagaacaagctgtatgaacaacatcttggaaaatccaacaacttccagaagcccaagcctgccaaaggcaagcctgaggctcacttctcactggtgcactatgccggcaccgtggactacaacatcgccggctggctggacaaaaacaaggaccccctgaatgagactgtggtggggctgtaccagaagtctgcaatgaagactctggctttcctcttctctggggcacaaactgctgaagcagagggtggtggtggaaagaaaggtggcaaaaagaagggttcttctttccagacagtgtcagctcttttcagggagaatttgaataagctgatgaccaacttgaggagcactcacccccactttgtgcggtgcatcatccccaatgaaactaaaactcctggtgccatggagcatgagcttgtcctgcatcagctgaggtgtaacggtgtgctggaaggcatccgcatctgcaggaaaggcttcccaagcagaatcctttatgcagacttcaaacagagatacaaggttctaaatgcgagtgctatcccagagggtcagttcattgacagcaagaaggcttctgagaaacttctagggtctattgaaattgaccacacccagtacaaattcggtcataccaaggttttcttcaaagctggcctgctgggaactctagaggaaatgcgagatgaaaagctagctcaactcatcacgcgcactcaagccatatgcagagggttcctgatgagagtggagttcagaaagatgatggagaggagagagtccatcttctgcattcagtacaacatccgtgctttcatgaatgtgaagcactggccctggatgaagctgtatttcaagatcaagcccctcctcaagagtgcagagacagagaaggagatggccaacatgaaggaagaatttgagaaaaccaaagaagagctggctaagacagaggcaaaaaggaaagaactagaagaaaagatggtgacgctaatgcaagagaaaaatgacttacaactccaagttcaagctgaagcagatgccttggctgatgcagaggaaagatgtgatcagttgattaaaaccaaaatccaacttgaggccaaaatcaaagaggtaactgaaagagctgaggatgaggaagagatcaatgctgagctgacagccaagaagaggaaactggaggatgaatgttcagagctcaagaaagacattgatgaccttgagctgacactggccaaggttgagaaggagaaacatgccacagagaacaaggtgaaaaacctcacagaagagatggcaggtctggatgaaaccattgctaagctgaccaaggagaagaaggctctccaggaggcccaccagcagaccctggatgacctgcagatggaggaggacaaagtcaacaccctgaccaaagctaaaaccaagctagaacagcaagtggacgatcttgaaggatctctggaacaagaaaagaaactttgcatggacttagaaagagccaagagaaaactggagggtgacctaaaattggcccaagaatccacaatggatacagaaaatgacaaacagcaacttaatgagaaactcaaaaagaaagagtttgaaatgagcaatctgcaaggcaagattgaagatgaacaagcccttgcaatacagctacaaaagaagatcaaagaattacaggcccgcattgaggagctggaggaggaaatcgaggcagagcgggcctcccgggccaaagcagagaagcagcgctctgacctctcccgggagctggaggagatcagtgagaggctggaagaagccggtggggccacttcagcccagattgagatgaacaagaagcgggaggctgagttccagaaaatgcgcagggacctggaagagtccaccctgcagcacgaagccacggcagctgctcttcggaagaagcacgcagatagtgtggctgagcttggggagcagattgacagccttcagcgggtcaagcagaagctggagaaggaaaagagtgagctgaagatggagatcaatgaccttgctagtaacatggagactgtctccaaagccaaggcaaactttgagaaaatgtgccgcaccctagaggaccagcttagtgaaataaaaacaaaggaagaagagcaacaacgcttaataaatgagttgtcagcccagaaggcacgtttacacacagaatcaggtgagttttcacgacagctagatgaaaaagatgctatggtttctcagctatcccgaggcaaacaagcatttacacaacagattgaagaattaaagaggcagctagaagaggagactaaggccaagagcactctggcccatgccctgcagtcagcccgccatgactgtgacctgctgcgggaacagtatgaggaggagcaggaagccaaggctgagctgcagaggggaatgtccaaggccaacagtgaggttgcccagtggaggaccaagtacgagacggacgccatccagcgcacagaggagctggaggaggccaagaagaagctagcccagcgtctgcaggatgcagaagaacatgtagaagctgtgaattccaaatgtgcttctcttgaaaagacaaagcagaggctacagaatgaagtagaggacctcatgattgatgtggaacgatctaatgctgcctgcatagctctcgataagaagcaaagaaactttgacaaggttctggcagaatggaaacagaagtatgaggaaactcaggctgaacttgaggcctcccagaaggagtcgcgttctctcagcactgagctgttcaaggtgaagaatgcctacgaggaatccctggatcatcttgaaactctaaagcgagagaataagaacttacaacaggagatttctgacctgacagagcaaattgcagagggtggaaagcatatccatgaactggagaaagtaaagaaacaacttgatcatgagaagagtgaactacagacttccctagaggaagcagaggcatctcttgagcatgaagaaggcaaaattcttcgcattcaacttgagctaaatcaggtgaaatctgagattgaccgaaaaattgctgaaaaagatgaagaactcgatcagctaaagaggaaccatctcagagttgtggagtcaatgcagagtacactggatgctgagatcaggagcagaaatgatgctctgaggatcaagaagaagatggagggagatcttaatgaaatggaaatccagctgaaccatgccaaccgccaggctgctgaggcactaaggaatcttagaaacacacaaggaatactgaaggacactcagctacatttggatgatgccatcagaggccaagatgaccttaaggaacaactggcaatggttgagcgcagagctaacctgatgcaggctgaagttgaagagctcagggcatccctggaacggactgagagaggcaggaaaatggcagagcaagagcttctggatgccagtgaacgtgtgcaacttctgcacactcagaacaccagcctgatcaacaccaagaagaagctggaaacagacatttcccaaatccagggagagatggaggacatcgtccaggaagcccgcaatgcagaggagaaggccaagaaggccatcactgatgctgccatgatggctgaggagctgaagaaggaacaggacaccagcgcccacctggagcggatgaagaagaacatggagcagaccgtgaaggatctgcagctccgtctggatgaggctgagcagctggcgctgaagggtgggaagaagcagatccagaaactggaggccagggtgagagagcttgaaagtgaggtggaaagtgaacagaagcacaatgttgaggctgtcaagggtcttcgcaaacatgagagaagagtgaaggaactcacttaccagactgaggaggaccgcaagaatattctcaggctgcaggacttggtggacaaattgcaaaccaaagtcaaagcttacaagagacaagctgaagaggctgaggaacaatccaatgtcaaccttgccaagttccgcaagctccagcacgagctggaggaggccaaggaacgggctgacattgctgagtcccaagtcaacaagctgagagtgaagagtcgggaggttcacacaaaagtcataagtgaagagtaattcattctaatgaaagaaaatgtgaccaaagaaatgcacgaaatgtgaagttctttgtcactgtcctgtatatcaaggaaataaa

SEQ ID NO: 62 - protein, 1939 aa, Homo sapiens
  MISC_FEATURE (1)..(1939): myosin, heavy chain 4, skeletal muscle (MYH4)
MSSDSEMAIFGEAAPFLRKSEKERIEAQNKPFDAKTSVFVVDPKESYVKAIVQSREGGKVTAKTEAGATVTVKEDQVFSMNPPKYDKIEDMAMMTHLHEPAVLYNLKERYAAWMIYTYSGLFCVTVNPYKWLPVYNPEVVTAYRGKKRQEAPPHIFSISDNAYQFMLTDRENQSILITGESGAGKTVNTKRVIQYFATIAVTGEKKKEEPASGKMQGTLEDQIISANPLLEAFGNAKTVRNDNSSRFGKFIRIHFGATGKLASADIETYLLEKSRVTFQLKAERSYHIFYQILSNKKPELIEMLLITTNPYDFAFVSQGEITVPSIDDQEELMATDSAVDILGFTADEKVAIYKLTGAVMHYGNMKFKQKQREEQAEPDGTEVADKAAYLTSLNSADLLKSLCYPRVKVGNEFVTKGQTVQQVYNAVGALAKAIYEKMFLWMVTRINQQLDTKQPRQYFIGVLDIAGFEIFDFNSLEQLCINFTNEKLQQFFNHHMFVLEQEEYKKEGIEWEFIDFGMDLAACIELIEKPMGIFSILEEECMFPKATDTSFKNKLYEQHLGKSNNFQKPKPAKGKPEAHFSLVHYAGTVDYNIAGWLDKNKDPLNETVVGLYQKSAMKTLAFLFSGAQTAEAEGGGGKKGGKKKGSSFQTVSALFRENLNKLMTNLRSTHPHFVRCIIPNETKTPGAMEHELVLHQLRCNGVLEGIRICRKGFPSRILYADFKQRYKVLNASAIPEGQFIDSKKASEKLLGSIEIDHTQYKFGHTKVFFKAGLLGTLEEMRDEKLAQLITRTQAICRGFLMRVEFRKMMERRESIFCIQYNIRAFMNVKHWPWMKLYFKIKPLLKSAETEKEMANMKEEFEKTKEELAKTEAKRKELEEKMVTLMQEKNDLQLQVQAEADALADAEERCDQLIKTKIQLEAKIKEVTERAEDEEEINAELTAKKRKLEDECSELKKDIDDLELTLAKVEKEKHATENKVKNLTEEMAGLDETIAKLTKEKKALQEAHQQTLDDLQMEEDKVNTLTKAKTKLEQQVDDLEGSLEQEKKLCMDLERAKRKLEGDLKLAQESTMDTENDKQQLNEKLKKKEFEMSNLQGKIEDEQALAIQLQKKIKELQARIEELEEEIEAERASRAKAEKQRSDLSRELEEISERLEEAGGATSAQIEMNKKREAEFQKMRRDLEESTLQHEATAAALRKKHADSVAELGEQIDSLQRVKQKLEKEKSELKMEINDLASNMETVSKAKANFEKMCRTLEDQLSEIKTKEEEQQRLINELSAQKARLHTESGEFSRQLDEKDAMVSQLSRGKQAFTQQIEELKRQLEEETKAKSTLAHALQSARHDCDLLREQYEEEQEAKAELQRGMSKANSEVAQWRTKYETDAIQRTEELEEAKKKLAQRLQDAEEHVEAVNSKCASLEKTKQRLQNEVEDLMIDVERSNAACIALDKKQRNFDKVLAEWKQKYEETQAELEASQKESRSLSTELFKVKNAYEESLDHLETLKRENKNLQQEISDLTEQIAEGGKHIHELEKVKKQLDHEKSELQTSLEEAEASLEHEEGKILRIQLELNQVKSEIDRKIAEKDEELDQLKRNHLRVVESMQSTLDAEIRSRNDALRIKKKMEGDLNEMEIQLNHANRQAAEALRNLRNTQGILKDTQLHLDDAIRGQDDLKEQLAMVERRANLMQAEVEELRASLERTERGRKMAEQELLDASERVQLLHTQNTSLINTKKKLETDISQIQGEMEDIVQEARNAEEKAKKAITDAAMMAEELKKEQDTSAHLERMKKNMEQTVKDLQLRLDEAEQLALKGGKKQIQKLEARVRELESEVESEQKHNVEAVKGLRKHERRVKELTYQTEEDRKNILRLQDLVDKLQTKVKAYKRQAEEAEEQSNVNLAKFRKLQHELEEAKERADIAESQVNKLRVKSREVHTKVISEE

SEQ ID NO: 63 - DNA, 5937 bp, Homo sapiens
  misc_feature (1)..(5937): myosin, heavy chain 6, cardiac muscle, alpha,(cardiomyopathy, hypertrophic 1) (MYH6)
agagagactcctgcggcccagattcttcaggattctccgtgaagggataaccaggggaagcaccaagatgaccgatgcccagatggctgactttggggcagcggcccagtacctccgcaagtcagagaaggagcgtctagaggcccagacccggccctttgacattcgcactgagtgcttcgtgcccgatgacaaggaagagtttgtcaaagccaagattttgtcccgggagggaggcaaggtcattgctgaaaccgagaatgggaagacggtgactgtgaaggaggaccaggtgttgcagcagaacccacccaagttcgacaagattgaggacatggccatgctgaccttcctgcacgagcccgcggtgcttttcaacctcaaggagcgctacgcggcctggatgatatatacctactcgggcctcttctgtgtcactgtcaacccctacaagtggctgccggtgtacaatgccgaggtggtggccgcctaccggggcaagaagaggagtgaggccccgccccacatcttctccatctccgacaacgcctatcagtacatgctgacagatcgggagaaccagtccatcctcatcacgggagaatccggggcggggaagactgtgaacaccaagcgtgtcatccagtactttgccagcattgcagccataggtgaccgtggcaagaaggacaatgccaatgcgaacaagggcaccctggaggaccagatcatccaggccaaccccgctctggaggccttcggcaatgccaagactgtccggaacgacaactcctcccgctttgggaaattcattaggatccactttggggccactggaaagctggcttctgcagacatagagacctacctgctggagaagtcccgggtgatcttccagctgaaagctgagagaaactaccacatcttctaccagattctgtccaacaagaagccggagttgctggacatgctgctggtcaccaacaatccctacgactacgccttcgtgtctcagggagaggtgtccgtggcctccattgatgactccgaggagctcatggccaccgatagtgcctttgacgtgctgggcttcacttcagaggagaaagctggcgtctacaagctgacgggagccatcatgcactacgggaacatgaagttcaagcagaagcagcgggaggagcaggcggagccagacggcaccgaagatgctgacaagtcggcctacctcatggggctgaactcagctgacctgctcaaggggctgtgccaccctcgggtgaaagtgggcaacgagtatgtcaccaaggggcagagcgtgcagcaggtgtactactccatcggggctctggccaaggcagtgtatgagaagatgttcaactggatggtgacgcgcatcaacgccaccctggagaccaagcagccacgccagtacttcataggagtcctggacatcgctggcttcgagatcttcgacttcaacagctttgagcagctctgcatcaacttcaccaacgagaagctgcagcagttcttcaaccaccacatgttcgtgctggagcaggaggagtacaagaaggagggcattgagtggacattcattgactttggcatggacctgcaggcctgcattgacctcatcgagaagcccatgggcatcatgtccatcctggaggaggagtgcatgttccccaaggccactgacatgaccttcaaggccaagctgtacgacaaccacctgggcaagtccaacaatttccagaagccacgcaacatcaaggggaagcaggaagcccacttctccctgatccactacgccggcactgtggactacaacatcctgggctggctggaaaaaaacaaggatcctctcaacgagactgttgtggccctgtaccagaagtcctccctcaagctcatggccactctcttctcctcctacgcaactgccgatactggggacagtggtaaaagcaaaggaggcaagaaaaagggctcatccttccagacggtgtcggctctccaccgggaaaatctcaacaagctaatgaccaacctgaggaccacccatcctcactttgtgcgttgcatcatccccaatgagcggaaggctccaggggtgatggacaaccccctggtcatgcaccagctgcgctgcaatggcgtgctggagggcatccgcatctgcaggaagggcttccccaaccgcatcctctacggggacttccggcagaggtatcgcatcctgaacccagtggccatccctgagggacagttcattgatagcaggaaggggacagagaagctgctcagctctctggacattgatcacaaccagtacaagtttggccacaccaaggtgttcttcaaggcagggctgcttgggctgctggaggagatgcgggatgagaggctgagccgcatcatcacgcgcatgcaggcccaagcccggggccagctcatgcgcattgagttcaagaagatagtggaacgcagggatgccctgctggtaatccagtggaacattcgggccttcatgggggtcaagaattggccctggatgaagctctacttcaagatcaagccgctgctgaagagcgcagagacggagaaggagatggccaccatgaaggaagagttcgggcgcatcaaagagacgctggagaagtccgaggctcgccgcaaggagctggaggagaagatggtgtccctgctgcaggagaagaatgacctgcagctccaagtgcaggcggaacaagacaacctcaatgatgctgaggagcgctgcgaccagctgatcaaaaacaagattcagctggaggccaaagtaaaggagatgaatgagaggctggaggatgaggaggagatgaacgcggagctcactgccaagaagcgcaagctggaagacgagtgctcagagctcaagaaggacattgatgacctggagctgacactggccaaggtggagaaggagaagcatgcaacagagaacaaggtgaagaacctaacagaggagatggctgggctggatgaaatcatcgctaagctgaccaaggagaagaaagctctacaagaggcccatcagcaggccctggatgaccttcaggttgaggaagacaaggtcaacagcctgtccaagtctaaggtcaagctggagcagcaggtggatgatctggagggatccctagagcaagagaagaaggtgcgcatggacctggagcgagcaaagcggaaactggagggcgacctgaagctgacccaggagagcatcatggacctggaaaatgataaactgcagctggaagaaaagcttaagaagaaggagtttgacattaatcagcagaacagtaagattgaggatgagcaggtgctggcccttcaactacagaagaaactgaaggaaaaccaggcacgcatcgaggagctggaggaggagctggaggccgagcgcaccgccagggctaaggtggagaagctgcgctcagacctgtctcgggagctggaggagatcagcgagcggctggaagaggccggcggggccacgtccgtgcagatcgagatgaacaagaagcgcgaggccgagttccagaagatgcggcgggacctggaggaggccacgctgcagcacgaggccactgccgcggccctgcgcaagaagcacgccgacagcgtggccgagctgggcgagcagatcgacaacctgcagcgggtgaagcagaagctggagaaggagaagagcgagttcaagctggagctggatgacgtcacctccaacatggagcagatcatcaaggccaaggcaaacctggagaaagtgtctcggacgctggaggaccaggccaatgagtaccgcgtgaagctagaagaggcccaacgctccctcaatgatttcaccacccagcgagccaagctgcagaccgagaatggagagttggcccggcagctagaggaaaaggaggcgctaatctcgcagctgacccgggggaagctctcttatacccagcaaatggaggacctcaaaaggcagctggaggaggagggcaaggcgaagaacgccctggcccatgcactgcagtcggcccggcatgactgcgacctgctgcgggagcagtacgaggaggagacagaggccaaggccgagctgcagcgcgtcctgtccaaggccaactcggaggtggcccagtggaggaccaagtatgagacggacgccattcagcggactgaggagctcgaagaggccaaaaagaagctggcccagcggctgcaggatgccgaggaggccgtggaggctgttaatgccaagtgctcctcactggagaagaccaagcaccggctacagaatgagatagaggacttgatggtggacgtagagcgctccaatgctgctgctgcagccctggacaagaagcagagaaactttgacaagatcctggccgagtggaagcagaagtatgaggagtcgcagtctgagctggagtcctcacagaaggaggctcgctccctcagcacagagctcttcaagctcaagaacgcctacgaggagtccctggagcacctagagaccttcaagcgggagaacaagaaccttcaggaggaaatctcggaccttactgagcagctaggagaaggaggaaagaatgtgcatgagctggagaaggtccgcaaacagctggaggtggagaagctggagctgcagtcagccctggaggaggcagaggcctccctggagcacgaggagggcaagatcctccgggcccagctagagttcaaccagatcaaggcagagatcgagcggaagctggcagagaaggacgaggagatggaacaggccaagcgcaaccaccagcgggtggtggactcgctgcagacctccctggatgcagagacacgcagccgcaacgaggtcctgagggtgaagaagaagatggaaggagacctcaatgagatggagatccagctcagccacgccaaccgcatggctgccgaggcccagaagcaagtcaagagcctccagagcttgctgaaggacacccagatccagctggacgatgcggtccgtgccaacgacgacctgaaggagaacatcgccatcgtggagcggcgcaacaacctgctgcaggctgagctggaggagctgcgtgccgtggtggagcagacagagcggtcccggaagctggcggagcaggagctgattgagaccagcgagcgggtgcagctgctgcattcccagaacaccagcctcatcaaccagaagaagaagatggagtcggatctgacccagctccagtcggaagtggaggaggcagtgcaggagtgcagaaacgccgaggagaaggccaagaaggccatcacggatgccgccatgatggcagaggagctgaagaaggagcaggacaccagcgcccacctggagcgcatgaagaagaacatggagcagaccattaaggacctgcagcaccggctggacgaggccgagcagatcgccctcaagggaggcaagaagcagctgcagaagctggaagcgcgggtgcgggagctggagggtgagctggaggccgagcagaagcgcaacgcagagtcggtgaagggcatgaggaagagcgagcggcgcatcaaggagctcacctaccagacagaggaagacaaaaagaacctgctgcggctacaggacctggtggacaagctgcaactgaaggtcaaggcctacaagcgccaggccgaggaggcggaggagcaagccaacaccaacctgtccaagttccgcaaggtgcagcatgagctggatgaggcagaggagcgggcggacatcgctgagtcccaggtcaacaagcttcgagccaagagccgtgacattggtgccaagcaaaaaatgcacgatgaggagtgacactgcctcgggaacctcactcttgccaacctgtaataaatatgagtgcc

SEQ ID NO: 64 - protein, 1939 aa, Homo sapiens
  MISC_FEATURE (1)..(1939): myosin, heavy chain 6, cardiac muscle, alpha,(cardiomyopathy, hypertrophic 1) (MYH6)
MTDAQMADFGAAAQYLRKSEKERLEAQTRPFDIRTECFVPDDKEEFVKAKILSREGGKVIAETENGKTVTVKEDQVLQQNPPKFDKIEDMAMLTFLHEPAVLFNLKERYAAWMIYTYSGLFCVTVNPYKWLPVYNAEVVAAYRGKKRSEAPPHIFSISDNAYQYMLTDRENQSILITGESGAGKTVNTKRVIQYFASIAAIGDRGKKDNANANKGTLEDQIIQANPALEAFGNAKTVRNDNSSRFGKFIRIHFGATGKLASADIETYLLEKSRVIFQLKAERNYHIFYQILSNKKPELLDMLLVTNNPYDYAFVSQGEVSVASIDDSEELMATDSAFDVLGFTSEEKAGVYKLTGAIMHYGNMKFKQKQREEQAEPDGTEDADKSAYLMGLNSADLLKGLCHPRVKVGNEYVTKGQSVQQVYYSIGALAKAVYEKMFNWMVTRINATLETKQPRQYFIGVLDIAGFEIFDFNSFEQLCINFTNEKLQQFFNHHMFVLEQEEYKKEGIEWTFIDFGMDLQACIDLIEKPMGIMSILEEECMFPKATDMTFKAKLYDNHLGKSNNFQKPRNIKGKQEAHFSLIHYAGTVDYNILGWLEKNKDPLNETVVALYQKSSLKLMATLFSSYATADTGDSGKSKGGKKKGSSFQTVSALHRENLNKLMTNLRTTHPHFVRCIIPNERKAPGVMDNPLVMHQLRCNGVLEGIRICRKGFPNRILYGDFRQRYRILNPVAIPEGQFIDSRKGTEKLLSSLDIDHNQYKFGHTKVFFKAGLLGLLEEMRDERLSRIITRMQAQARGQLMRIEFKKIVERRDALLVIQWNIRAFMGVKNWPWMKLYFKIKPLLKSAETEKEMATMKEEFGRIKETLEKSEARRKELEEKMVSLLQEKNDLQLQVQAEQDNLNDAEERCDQLIKNKIQLEAKVKEMNERLEDEEEMNAELTAKKRKLEDECSELKKDIDDLELTLAKVEKEKHATENKVKNLTEEMAGLDEIIAKLTKEKKALQEAHQQALDDLQVEEDKVNSLSKSKVKLEQQVDDLEGSLEQEKKVRMDLERAKRKLEGDLKLTQESIMDLENDKLQLEEKLKKKEFDINQQNSKIEDEQVLALQLQKKLKENQARIEELEEELEAERTARAKVEKLRSDLSRELEEISERLEEAGGATSVQIEMNKKREAEFQKMRRDLEEATLQHEATAAALRKKHADSVAELGEQIDNLQRVKQKLEKEKSEFKLELDDVTSNMEQIIKAKANLEKVSRTLEDQANEYRVKLEEAQRSLNDFTTQRAKLQTENGELARQLEEKEALISQLTRGKLSYTQQMEDLKRQLEEEGKAKNALAHALQSARHDCDLLREQYEEETEAKAELQRVLSKANSEVAQWRTKYETDAIQRTEELEEAKKKLAQRLQDAEEAVEAVNAKCSSLEKTKHRLQNEIEDLMVDVERSNAAAAALDKKQRNFDKILAEWKQKYEESQSELESSQKEARSLSTELFKLKNAYEESLEHLETFKRENKNLQEEISDLTEQLGEGGKNVHELEKVRKQLEVEKLELQSALEEAEASLEHEEGKILRAQLEFNQIKAEIERKLAEKDEEMEQAKRNHQRVVDSLQTSLDAETRSRNEVLRVKKKMEGDLNEMEIQLSHANRMAAEAQKQVKSLQSLLKDTQIQLDDAVRANDDLKENIAIVERRNNLLQAELEELRAVVEQTERSRKLAEQELIETSERVQLLHSQNTSLINQKKKMESDLTQLQSEVEEAVQECRNAEEKAKKAITDAAMMAEELKKEQDTSAHLERMKKNMEQTIKDLQHRLDEAEQIALKGGKKQLQKLEARVRELEGELEAEQKRNAESVKGMRKSERRIKELTYQTEEDKKNLLRLQDLVDKLQLKVKAYKRQAEEAEEQANTNLSKFRKVQHELDEAEERADIAESQVNKLRAKSRDIGAKQKMHDEE

SEQ ID NO: 65 - DNA, 6044 bp, Homo sapiens
  misc_feature (1)..(6044): myosin, heavy chain 7, cardiac muscle, beta (MYH7)
cacagctctgtcctgctctgtgtctttccctgctgctctcaggtcccctgcaggccttggcccctttcctcatctgtagacacacttgagtagcccaggcacagccatgggagattcggagatggcagtctttggggctgccgccccctacctgcgcaagtcagagaaggagcggctagaagcgcagaccaggccttttgacctcaagaaggatgtcttcgtgcctgatgacaaacaggagtttgtcaaggccaagatcgtgtctcgagagggtggcaaagtcactgccgagaccgagtatggcaagacagtgaccgtgaaggaggaccaggtgatgcagcagaacccacccaagttcgacaaaatcgaggacatggccatgctgaccttcctgcatgagcccgcggtgctctacaacctcaaggatcgctacggctcctggatgatctacacctactcgggcctcttctgtgtcaccgtcaacccttacaagtggctgccggtgtacactcctgaggtggtggctgcctaccggggcaagaagaggagcgaggccccgccccacatcttctccatctccgacaacgcctatcagtacatgctgacagacagagaaaaccagtccatcctgatcaccggagaatccggagcagggaagacagtcaacaccaagagggtcatccagtactttgctgttattgcagccattggggaccgcagcaagaaggaccagagcccgggcaagggcaccctggaggaccagatcatccaggccaaccctgctctggaggcctttggcaatgccaagaccgtccggaacgacaactcctcccgcttcgggaaattcattcgaattcattttggggcaacaggaaagttggcatctgcagacatagagacctatcttctggaaaaatccagagttattttccagctgaaagcagagagagattatcacattttctaccaaatcctgtctaacaaaaagcctgagctgctggacatgctgctgatcaccaacaacccctacgattatgcattcatctcccaaggagagaccaccgtggcctccattgatgacgctgaggagctcatggccactgataacgcttttgatgtgctgggcttcacttcagaggagaaaaactccatgtataagctgacaggcgccatcatgcactttggaaacatgaagttcaagctgaagcagcgggaggagcaggcggagccagacggcactgaagaggctgacaagtctgcctacctcatggggctgaactcagccgacctgctcaaggggctgtgccaccctcgggtgaaagtgggcaatgagtacgtcaccaaggggcagaatgtccagcaggtgatatatgccactggggcactggccaaggcagtgtatgagaggatgttcaactggatggtgacgcgcatcaatgccaccctggagaccaagcagccacgccagtacttcataggagtcctggacatcgctggcttcgagatcttcgatttcaacagctttgagcagctctgcatcaacttcaccaacgagaagctgcagcagttcttcaaccaccacatgtttgtgctggagcaggaggagtacaagaaggagggcatcgagtggacattcattgactttggcatggacctgcaggcctgcattgacctcatcgagaagcccatgggcatcatgtccatcctggaagaggagtgcatgttccccaaggccaccgacatgaccttcaaggccaagctgtttgacaaccacctgggcaaatccgccaacttccagaagccacgcaatatcaaggggaagcctgaagcccacttctccctgatccactatgccggcatcgtggactacaacatcattggctggctgcagaagaacaaggatcctctcaatgagactgtcgtgggcttgtatcagaagtcttccctcaagctgctcagcaccctgtttgccaactatgctggggctgatgcgcctattgagaagggcaaaggcaaggccaagaaaggctcgtcctttcagactgtgtcagctctgcacagggaaaatctgaacaagctgatgaccaacttgcgctccacccatccccactttgtacgttgtatcatccctaatgagacaaagtctccaggggtgatggacaaccccctggtcatgcaccagctgcgctgcaatggtgtgctggagggcatccgcatctgcaggaaaggcttccccaaccgcatcctctacggggacttccggcagaggtatcgcatcctgaacccagcggccatccctgagggacagttcattgatagcaggaagggggcagagaagctgctcagctccctggacattgatcacaaccagtacaagtttggccacaccaaggtgttcttcaaggccgggctgctggggctgctggaggaaatgagggacgagaggctgagccgcatcatcacgcgtatccaggcccagtcccgaggtgtgctcgccagaatggagtacaaaaagctgctggaacgtagagactccctgctggtaatccagtggaacattcgggccttcatgggggtcaagaattggccctggatgaagctctacttcaagatcaagccgctgctgaagagtgcagaaagagagaaggagatggcctccatgaaggaggagttcacacgcctcaaagaggcgctagagaagtccgaggctcgccgcaaggagctggaggagaagatggtgtccctgctgcaggagaagaatgacctgcagctccaagtgcaggcggaacaagacaacctggcagatgctgaggagcgctgtgatcagctgatcaaaaacaagattcagctggaggccaaggtgaaggagatgaacgagaggctggaggatgaggaggagatgaatgctgagctcactgccaagaagcgcaagctggaagatgagtgctcagagctcaaaagggacatcgatgatctggagctgacactggccaaagtggagaaggagaaacacgcaacagagaacaaggtgaaaaacctgacagaggagatggctgggctggatgagatcattgccaagctgaccaaggagaagaaagctctgcaagaggcccaccaacaggctctggatgaccttcaggccgaggaggacaaggtcaacaccctgactaaggccaaagtcaagctggagcagcaagtggatgatctggaaggatccctggagcaagagaagaaggtgcgcatggacctggagcgagcgaagcggaagctggagggcgacctgaagctgacccaggagagcatcatggacctggagaatgacaagcagcagctggatgagcggctgaaaaaaaaagactttgagctgaatgctctcaacgcaaggattgaggatgaacaggccctcggcagccagctgcagaagaagctcaaggagcttcaggcacgcatcgaggagctggaggaggagctggaggccgagcgcaccgccagggctaaggtggagaagctgcgctcagacctgtctcgggagctggaggagatcagcgagcggctggaagaggccggcggggccacgtccgtgcagatcgagatgaacaagaagcgcgaggccgagttccagaagatgcggcgggacctggaggaggccacgctgcagcacgaggccactgccgcggccctgcgcaagaagcacgccgacagcgtggccgagctgggcgagcagatcgacaacctgcagcgggtgaagcagaagctggagaaggagaagagcgagttcaagctggagctggatgacgtcacctccaacatggagcagatcatcaaggccaaggctaacctggagaagatgtgccggaccttggaagaccagatgaatgagcaccggagcaaggcggaggagacccagcgttctgtcaacgacctcaccagccagcgggccaagttgcaaaccgagaatggtgagctgtcccggcagctggatgagaaggaggcactgatctcccagctgacccgaggcaagctcacctacacccagcagctggaggacctcaagaggcagctggaggaggaggttaaggcgaagaacgccctggcccacgcactgcagtcggcccggcatgactgcgacctgctgcgggagcagtacgaggaggagacggaggccaaggccgagctgcagcgcgtcctttccaaggccaactcggaggtggcccagtggaggaccaagtatgagacggacgccattcagcggactgaggagctcgaggaggccaagaagaagctggcccagcggctgcaggaagctgaggaggccgtggaggctgttaatgccaagtgctcctcgctggagaagaccaagcaccggctacagaatgagatcgaggacttgatggtggacgtagagcgctccaatgctgctgctgcagccctggacaagaagcagaggaacttcgacaagatcctggccgagtggaagcagaagtatgaggagtcgcagtcggagctggagtcctcgcagaaggaggctcgctccctcagcacagagctcttcaaactcaagaacgcctatgaggagtccctggaacatctggagaccttcaagcgggagaacaaaaacctgcaggaggagatctccgacttgactgagcagttgggttccagcggaaagactatccatgagctggagaaggtccgaaagcagctggaggccgagaagatggagctgcagtcagccctggaggaggccgaggcctccctggagcacgaggagggcaagatcctccgggcccagctggagttcaaccagatcaaggcagagatcgagcggaagctggcagagaaggacgaggagatggaacaggccaagcgcaaccacctgcgggtggtggactcgctgcagacctccctggacgcagagacacgcagccgcaacgaggccctgagggtgaagaagaagatggaaggagacctcaatgagatggagatccagctcagccacgccaaccgcatggccgccgaggcccagaagcaagtcaagagcctccagagcttgttgaaggacacccagattcagctggacgatgcagtccgtgccaacgacgacctgaaggagaacatcgccatcgtggagcggcgcaacaacctgctgcaggctgagctggaggagttgcgtgccgtggtggagcagacagagcggtcccggaagctggcggagcaggagctgattgagactagtgagcgggtgcagctgctgcattcccagaacaccagcctcatcaaccagaagaagaagatggatgctgacctgtcccagctccagactgaagtggaggaggcagtgcaggagtgcaggaatgctgaggagaaggccaagaaggccatcacggatgccgccatgatggcagaggagctgaagaaggagcaggacaccagcgcccacctggagcgcatgaagaagaacatggaacagaccattaaggacctgcagcaccggctggacgaagccgagcagatcgccctcaagggcggcaagaagcagctgcagaagctggaagcgcgggtgcgggagctggagaatgagctggaggccgagcagaagcgcaacgcagagtcggtgaagggcatgaggaagagcgagcggcgcatcaaggagctcacctaccagacggaggaggacaggaaaaacctgctgcggctgcaggacctggtagacaagctgcagctaaaggtcaaggcctacaagcgccaggccgaggaggcggaggagcaagccaacaccaacctgtccaagttccgcaaggtgcagcacgagctggatgaggcagaggagcgggcggacatcgccgagtcccaggtcaacaagctgcgggccaagagccgtgacattggcacgaagggcttgaatgaggagtagctttgccacatcttgatctgctcagccctggaggtgccagcaaagccccatgctggagcctgtgtaacagctccttgggaggaagcagaataaagcaattttccttgaagccgagaaaaaaaaaaaaaaa

SEQ ID NO: 66 - protein, 1935 aa, Homo sapiens
  MISC_FEATURE (1)..(1935): myosin, heavy chain 7, cardiac muscle, beta (MYH7)
MGDSEMAVFGAAAPYLRKSEKERLEAQTRPFDLKKDVFVPDDKQEFVKAKIVSREGGKVTAETEYGKTVTVKEDQVMQQNPPKFDKIEDMAMLTFLHEPAVLYNLKDRYGSWMIYTYSGLFCVTVNPYKWLPVYTPEVVAAYRGKKRSEAPPHIFSISDNAYQYMLTDRENQSILITGESGAGKTVNTKRVIQYFAVIAAIGDRSKKDQSPGKGTLEDQIIQANPALEAFGNAKTVRNDNSSRFGKFIRIHFGATGKLASADIETYLLEKSRVIFQLKAERDYHIFYQILSNKKPELLDMLLITNNPYDYAFISQGETTVASIDDAEELMATDNAFDVLGFTSEEKNSMYKLTGAIMHFGNMKFKLKQREEQAEPDGTEEADKSAYLMGLNSADLLKGLCHPRVKVGNEYVTKGQNVQQVIYATGALAKAVYERMFNWMVTRINATLETKQPRQYFIGVLDIAGFEIFDFNSFEQLCINFTNEKLQQFFNHHMFVLEQEEYKKEGIEWTFIDFGMDLQACIDLIEKPMGIMSILEEECMFPKATDMTFKAKLFDNHLGKSANFQKPRNIKGKPEAHFSLIHYAGIVDYNIIGWLQKNKDPLNETVVGLYQKSSLKLLSTLFANYAGADAPIEKGKGKAKKGSSFQTVSALHRENLNKLMTNLRSTHPHFVRCIIPNETKSPGVMDNPLVMHQLRCNGVLEGIRICRKGFPNRILYGDFRQRYRILNPAAIPEGQFIDSRKGAEKLLSSLDIDHNQYKFGHTKVFFKAGLLGLLEEMRDERLSRIITRIQAQSRGVLARMEYKKLLERRDSLLVIQWNIRAFMGVKNWPWMKLYFKIKPLLKSAEREKEMASMKEEFTRLKEALEKSEARRKELEEKMVSLLQEKNDLQLQVQAEQDNLADAEERCDQLIKNKIQLEAKVKEMNERLEDEEEMNAELTAKKRKLEDECSELKRDIDDLELTLAKVEKEKHATENKVKNLTEEMAGLDEIIAKLTKEKKALQEAHQQALDDLQAEEDKVNTLTKAKVKLEQQVDDLEGSLEQEKKVRMDLERAKRKLEGDLKLTQESIMDLENDKQQLDERLKKKDFELNALNARIEDEQALGSQLQKKLKELQARIEELEEELEAERTARAKVEKLRSDLSRELEEISERLEEAGGATSVQIEMNKKREAEFQKMRRDLEEATLQHEATAAALRKKHADSVAELGEQIDNLQRVKQKLEKEKSEFKLELDDVTSNMEQIIKAKANLEKMCRTLEDQMNEHRSKAEETQRSVNDLTSQRAKLQTENGELSRQLDEKEALISQLTRGKLTYTQQLEDLKRQLEEEVKAKNALAHALQSARHDCDLLREQYEEETEAKAELQRVLSKANSEVAQWRTKYETDAIQRTEELEEAKKKLAQRLQEAEEAVEAVNAKCSSLEKTKHRLQNEIEDLMVDVERSNAAAAALDKKQRNFDKILAEWKQKYEESQSELESSQKEARSLSTELFKLKNAYEESLEHLETFKRENKNLQEEISDLTEQLGSSGKTIHELEKVRKQLEAEKMELQSALEEAEASLEHEEGKILRAQLEFNQIKAEIERKLAEKDEEMEQAKRNHLRVVDSLQTSLDAETRSRNEALRVKKKMEGDLNEMEIQLSHANRMAAEAQKQVKSLQSLLKDTQIQLDDAVRANDDLKENIAIVERRNNLLQAELEELRAVVEQTERSRKLAEQELIETSERVQLLHSQNTSLINQKKKMDADLSQLQTEVEEAVQECRNAEEKAKKAITDAAMMAEELKKEQDTSAHLERMKKNMEQTIKDLQHRLDEAEQIALKGGKKQLQKLEARVRELENELEAEQKRNAESVKGMRKSERRIKELTYQTEEDRKNLLRLQDLVDKLQLKVKAYKRQAEEAEEQANTNLSKFRKVQHELDEAEERADIAESQVNKLRAKSRDIGTKGLNEE

SEQ ID NO: 67 - DNA, 6289 bp, Homo sapiens
  misc_feature (1)..(6289): myosin, heavy chain 7B, cardiac muscle, beta (MYH7B)
tggggttttgatgtgttgcccaggctggtcttgaactcctgagcttaagtgatgtgtccgcctgggcctcccaaagtgctggaattacagacatgagtggcaataaaaggggtagcagagcttcctgccctcaccgtggtgccgagtgcctgctgccttgggccgccttgaacctccagggtttccagctcctcctccttcaccccagtgccactgccatgatggatgtgagtgaacttggggagtctgcccgctacctccgccagggctaccaggagatgacgaaggtgcacactatcccatgggacgggaagaagcgagtctgggtgcctgatgaacaggacgcctacgtggaggccgaggtcaagtcggaggctaccgggggcagagtcaccgtggagaccaaagaccagaaggtgctgatggtgcgtgaagccgagctgcagcccatgaacccgcctcgcttcgacttactggaggacatggccatgatgacgcacctgaacgaggcctctgtgctgcacaacctgcgccagcgctatgcccgctggatgatctatacctactcaggcctcttctgtgtcaccatcaacccctacaaatggctcccagtctatacggcctccgtagtggctgcttacaagggaaagcgccgctcagattccccgccccatatatatgcggtggcggacaacgcctacaacgacatgctgcgcaaccgagacaaccagtccatgctgatcaccggagagtcgggggccggtaagacggttaacaccaagcgggtcattcagtactttgccatcgtcgctgccctgggagacgggccgggcaagaaggcccaatttctggcaacaaagacggggggcacccttgaggatcaaatcatcgaggccaaccctgccatggaggcctttggcaacgccaagaccctgaggaatgataactcctcccgctttggcaagttcatccgcattcactttggtccctctgggaagctggcatccgcggatattgacagctatctcctggagaagtcgcgggtgatcttccagttgcctggtgagcgcagctaccatgtctactaccagatcctctcagggaggaagccagagctgcaggacatgctgcttctgtctatgaacccctatgactaccacttctgcagccagggcgtcatcaccgtggacaacatgaatgatggggaggagctcatcgccaccgaccatgccatggacatcctaggcttcagcgtggatgagaaatgtgcctgctataagatcgtgggcgccctcctgcactttggcaacatgaagttcaagcagaagcagcgggaggagcaggcggaggccgatggcactgagagtgctgacaaggctgcctacctgatgggggtcagcagtggggacctcctcaaaggccttttgcacccccgggtgcgtgtagggaacgagtacgtgaccaagggccagagtgtggagcaggtggtgtttgctgtgggggctctggccaaggccacctatgaccggctgttcaggtggctggtgtctcggatcaaccagaccctggacacaaagctgccccggcagttcttcatcggggttctggacatcgctgggtttgagatctttgagttcaacagcttcgaacagctgtgcatcaacttcaccaatgagaaattgcagcagttcttcaaccagcacatgtttgtgctggagcaggaggagtacaagcgggagggcatcgactgggtcttcatcgacttcggccttgacctgcagccttgcatcgacctcatcgagaagccactgggcatcctgtccatcctggaggaggaatgcatgttccccaaggcctcagacgccagcttccgggccaagctctacgacaaccacgcggggaagtcacccaatttccagcagcctcggcctgacaagaagcgcaagtaccaggcccacttcgaggtggtccactacgcaggcgtggtgccttacagcattgtgggctggctggagaaaaacaaggatcccctgaatgagaccgtggtccccatcttccagaagtcacagaataggctcctggcgactctctatgagaattatgcgggctcctgctccactgagccccccaagtctggggtgaaagagaagcgtaagaaggcagcatcgttccagacggtgtcccagctgcacaaggagaacctcaacaagctgatgaccaacctgcgggccacacagccccacttcgtccgctgcattgtccccaacgagaacaaaaccccaggggtcatggatgccttcttggtgctacaccagctgcgctgcaatggggtcctggaggggatccggatctgccgccaagggttccccaacaggttgctctacaccgacttccggcagcggtaccgtatcctgaaccccagtgccatcccggatgacaccttcatggacagcaggaaggccacagagaaactgctgggctcgctggacttggatcacacccagtaccagtttggccacaccaaggtgttcttcaaggctgggcttctaggcgtcctggaagagctccgtgaccagcgcctggccaaggtgctgacgctgctgcaggcgcggagccgtggccgcctcatgcgccttgagtaccagcgcctgctgggaggcagggatgcgctgttcaccatccagtggaacatccgtgccttcaatgccgtcaagaactggtcatggatgaagctctttttcaagatgaagccgctgctgcgctcggcgcaggctgaggaggagctggcggccctgcgggcagagctgcgggggttgcgaggggcgctggctgcggccgaggccaagcgccaggaactggaggagacgcacgtcagcatcacccaggagaagaatgacctggccctgcagctgcaggctgagcaggacaacctggcagatgccgaggagcgctgccacttgctgatcaagtccaaggtgcagctggaggggaaggtgaaggagctgagtgagcggctggaggatgaggaggaggtgaacgctgacctggccgcccgccggcgcaagctggaggacgagtgcacggagctcaagaaggacattgatgacctgaagctgacactggccaaagctgagaaggagaagcaagccactgagaacaaggtgaagaacctgacggaagagatggctgcgctggacgagtcagtggcccggctgaccaaggagaagaaggcgttgcaggaggcccaccaacaggccctgggtgacctgcaggccgaggaggaccgtgtgagcgcgctgaccaaggccaagctccggctggagcaacaggtggaggacctggaatgctccctggagcaggagaagaagctgcgcatggacacggagcgggccaagcgcaagctggagggtgacctgaagctgacgcaggagtcggtggctgatgctgctcaagacaagcagcagctggaggagaagctcaagaagaaggactccgagctgagccagctgagcctgcgggtggaagacgagcagctcttgggggcccagatgcagaagaagatcaaggagctgcaggctcgggcggaggagctggaagaggagctggaggcagagcgggcagcccgggcccgcgtggagaagcagcgtgcagaggcggcgcgggagctggaggagctgagcgagcggctggaggaggcaggcggcgcatccgcggggcagcgcgagggctgccgcaagcgggaggcggagctggggaggctgcggcgggagctggaggaggcggcgctgcggcacgaggccacagtggcggcactgcggcgcaagcaggcggagggcgcggcggagctgggggagcaggtggacagcctgcagcgggtgcggcagaagctggagaaggagaagagtgagctgcgcatggaggtggacgacctggctgccaacgtggagactctgacccgcgccaaggccagtgcagagaagctgtgccggacctatgaggatcagctaagcgaggccaagatcaaggtggaggagctgcagcggcagctggcggacgcaagcacgcagcgtgggcgactacagacggaaagcggggagctgagtcgcctgctagaggagaaggagtgtctgatcagtcagctgagccgtggaaaggccctggccgcccaaagcctggaagagttgcggcgccagctagaggaggaaagcaaggccaagagtgccctggcccacgccgtgcaggctctgcggcacgactgtgacctcctgcgggagcaacacgaggaggaggctgaggcccaggctgagctgcagcggctgctgtccaaggccaatgccgaggtggcccagtggaggagcaagtacgaagcagatgccatccagaggaccgaggagctggaggaggccaaaaaaaagctggcactgcggctgcaggaggcagaggagggcgtggaggctgccaacgccaagtgctcatcgttggagaaggccaagctgcggctacagacagagtcagaggatgtaaccctggagctggagcgggcgacctcagcagctgctgcgctggacaagaagcagcggcacttggaacgggcactggaggaacggcggcggcaggaggaggagatgcagcgggagctggaggcggcacagagggagtcccgtggcctgggcaccgagctcttccggctgcggcacggccacgaggaggcacttgaagccctggagacgctcaagcgggagaacaagaacctgcaggaggagatcagcgacctcacagaccaggtgagtctcagtgggaagagcatccaggaactggagaaaaccaagaaggcgctggaaggcgagaagagtgagatccaggctgcactggaggaggcagagggggccctggagctggaggagaccaagacgctgcggatccagctggagctctcccaggtcaaagcagaagtggaccggaagctggcagagaaagacgaggagtgcgctaacctgaggcgcaaccaccagcgagctgtggagtccctgcaggcctccctggatgcagagacacgggcccgcaatgaggcgctgcggctcaagaagaagatggagggtgacctcaacgacctggagctgcagctgggccatgccacccgtcaggccacagaggcccaggctgccacgcggctgatgcaggcacagctcaaggaggagcaggcagggcgggacgaggagcagcggctggcagctgagctccacgagcaggcgcaggctctggagcgccgggcctcgctgctggctgcggagctggaggagctgcgggctgccctggagcagggcgagcgcagccggcgactggcagagcaggagcttttggaggccaccgagcgcctcaaccttctgcattcgcagaacacaggcctcctaaaccagaagaagaagctggaggcggacttggcccagctgagcggggaggtggaggaggctgcacaggagaggcgggaggctgaggagaaggccaaaaaggccatcactgatgcggccatgatggccgaggagctgaagaaggagcaggacacaagtgcacacctggaacggatgaagaagacgctggagcagacggtgcgcgagctccaggcccgccttgaggaggcagaacaggccgccctccgtggcgggaagaagcaggtgcagaagctggaggccaaggtacgggagctggaggctgagcttgatgcagagcagaagaagcacgccgaggcccttaagggcgtgcgcaagcatgagcgccgtgtcaaggagctcgcataccaggccgaggaggacaggaagaacctggctcgcatgcaggacctggtggacaagctgcagagcaaggtcaagagctacaagcgccagtttgaggaggcggagcagcaggccaacaccaacctggccaagtatcgcaaggcccagcacgagctggatgatgcggaggagcgggcagacatggcggaaacccaggccaacaagctgcgggcacggacccgggacgccctgggccccaagcacaaggagtgacggcctgaccccctgggctctaaagaggaatgtctgctgttgcacatctggctgaggccacctgccccgatcctgccatctctgcatcgccccctgctgccttcagccttccctgggccctgaataaacaccacagccagtttccttctcattcttttctttggggttcaggaggaaaaacacagtcctagggacaaaagccaggtccacagcagtcatttttaaaataaagttatttaatagtc

SEQ ID NO: 68 - protein, 1983 aa, Homo sapiens
  MISC_FEATURE (1)..(1983): myosin, heavy chain 7B, cardiac muscle, beta (MYH7B)
MSGNKRGSRASCPHRGAECLLPWAALNLQGFQLLLLHPSATAMMDVSELGESARYLRQGYQEMTKVHTIPWDGKKRVWVPDEQDAYVEAEVKSEATGGRVTVETKDQKVLMVREAELQPMNPPRFDLLEDMAMMTHLNEASVLHNLRQRYARWMIYTYSGLFCVTINPYKWLPVYTASVVAAYKGKRRSDSPPHIYAVADNAYNDMLRNRDNQSMLITGESGAGKTVNTKRVIQYFAIVAALGDGPGKKAQFLATKTGGTLEDQIIEANPAMEAFGNAKTLRNDNSSRFGKFIRIHFGPSGKLASADIDSYLLEKSRVIFQLPGERSYHVYYQILSGRKPELQDMLLLSMNPYDYHFCSQGVITVDNMNDGEELIATDHAMDILGFSVDEKCACYKIVGALLHFGNMKFKQKQREEQAEADGTESADKAAYLMGVSSGDLLKGLLHPRVRVGNEYVTKGQSVEQVVFAVGALAKATYDRLFRWLVSRINQTLDTKLPRQFFIGVLDIAGFEIFEFNSFEQLCINFTNEKLQQFFNQHMFVLEQEEYKREGIDWVFIDFGLDLQPCIDLIEKPLGILSILEEECMFPKASDASFRAKLYDNHAGKSPNFQQPRPDKKRKYQAHFEVVHYAGVVPYSIVGWLEKNKDPLNETVVPIFQKSQNRLLATLYENYAGSCSTEPPKSGVKEKRKKAASFQTVSQLHKENLNKLMTNLRATQPHFVRCIVPNENKTPGVMDAFLVLHQLRCNGVLEGIRICRQGFPNRLLYTDFRQRYRILNPSAIPDDTFMDSRKATEKLLGSLDLDHTQYQFGHTKVFFKAGLLGVLEELRDQRLAKVLTLLQARSRGRLMRLEYQRLLGGRDALFTIQWNIRAFNAVKNWSWMKLFFKMKPLLRSAQAEEELAALRAELRGLRGALAAAEAKRQELEETHVSITQEKNDLALQLQAEQDNLADAEERCHLLIKSKVQLEGKVKELSERLEDEEEVNADLAARRRKLEDECTELKKDIDDLKLTLAKAEKEKQATENKVKNLTEEMAALDESVARLTKEKKALQEAHQQALGDLQAEEDRVSALTKAKLRLEQQVEDLECSLEQEKKLRMDTERAKRKLEGDLKLTQESVADAAQDKQQLEEKLKKKDSELSQLSLRVEDEQLLGAQMQKKIKELQARAEELEEELEAERAARARVEKQRAEAARELEELSERLEEAGGASAGQREGCRKREAELGRLRRELEEAALRHEATVAALRRKQAEGAAELGEQVDSLQRVRQKLEKEKSELRMEVDDLAANVETLTRAKASAEKLCRTYEDQLSEAKIKVEELQRQLADASTQRGRLQTESGELSRLLEEKECLISQLSRGKALAAQSLEELRRQLEEESKAKSALAHAVQALRHDCDLLREQHEEEAEAQAELQRLLSKANAEVAQWRSKYEADAIQRTEELEEAKKKLALRLQEAEEGVEAANAKCSSLEKAKLRLQTESEDVTLELERATSAAAALDKKQRHLERALEERRRQEEEMQRELEAAQRESRGLGTELFRLRHGHEEALEALETLKRENKNLQEEISDLTDQVSLSGKSIQELEKTKKALEGEKSEIQAALEEAEGALELEETKTLRIQLELSQVKAEVDRKLAEKDEECANLRRNHQRAVESLQASLDAETRARNEALRLKKKMEGDLNDLELQLGHATRQATEAQAATRLMQAQLKEEQAGRDEEQRLAAELHEQAQALERRASLLAAELEELRAALEQGERSRRLAEQELLEATERLNLLHSQNTGLLNQKKKLEADLAQLSGEVEEAAQERREAEEKAKKAITDAAMMAEELKKEQDTSAHLERMKKTLEQTVRELQARLEEAEQAALRGGKKQVQKLEAKVRELEAELDAEQKKHAEALKGVRKHERRVKELAYQAEEDRKNLARMQDLVDKLQSKVKSYKRQFEEAEQQANTNLAKYRKAQHELDDAEERADMAETQANKLRARTRDALGPKHKE

SEQ ID NO: 69 - DNA, 7474 bp, Homo sapiens
  misc_feature (1)..(7474): myosin, heavy chain 9, non-muscle (MYH9)
atacgactcactatagggcgatcaggtgctggaaagaaggctaagcaaggctgacctgctgcagctcccgcctcgtgcgctcgccccacccggccgccgcccgagcgctcgagaaagtcctctcgggagaagcagcgcctgttcccggggcagatccaggttcaggtcctggctataagtcaccatggcacagcaagctgccgataagtatctctatgtggataaaaacttcatcaacaatccgctggcccaggccgactgggctgccaagaagctggtatgggtgccttccgacaagagtggctttgagccagccagcctcaaggaggaggtgggcgaagaggccatcgtggagctggtggagaatgggaagaaggtgaaggtgaacaaggatgacatccagaagatgaacccgcccaagttctccaaggtggaggacatggcagagctcacgtgcctcaacgaagcctcggtgctgcacaacctcaaggagcgttactactcagggctcatctacacctattcaggcctgttctgtgtggtcatcaatccttacaagaacctgcccatctactctgaagagattgtggaaatgtacaagggcaagaagaggcacgagatgccccctcacatctatgccatcacagacaccgcctacaggagtatgatgcaagaccgagaagatcaatccatcttgtgcactggtgaatctggagctggcaagacggagaacaccaagaaggtcatccagtatctggcgtacgtggcgtcctcgcacaagagcaagaaggaccagggcgagctggagcggcagctgctgcaggccaaccccatcctggaggccttcgggaacgccaagaccgtgaagaatgacaactcctcccgcttcggcaaattcattcgcatcaactttgatgtcaatggctacattgttggagccaacattgagacttatcttttggagaaatctcgtgctatccgccaagccaaggaagaacggaccttccacatcttctattatctcctgtctggggctggagagcacctgaagaccgatctcctgttggagccgtacaacaaataccgcttcctgtccaatggacacgtcaccatccccgggcagcaggacaaggacatgttccaggagaccatggaggccatgaggattatgggcatcccagaagaggagcaaatgggcctgctgcgggtcatctcaggggttcttcagctcggcaacatcgtcttcaagaaggagcggaacactgaccaggcgtccatgcccgacaacacagctgcccaaaaggtgtcccatctcttgggtatcaatgtgaccgatttcaccagaggaatcctcaccccgcgcatcaaggtgggacgggattacgtccagaaggcgcagactaaagagcaggctgactttgccatcgaggccttggccaaggcgacctatgagcggatgttccgctggctggtgctgcgcatcaacaaggctctggacaagaccaagaggcagggcgcctccttcatcgggatcctggacattgccggcttcgagatctttgatctgaactcgtttgagcagctgtgcatcaattacaccaatgagaagctgcagcagctcttcaaccacaccatgttcatcctggagcaggaggagtaccagcgcgagggcatcgagtggaacttcatcgactttggcctcgacctgcagccctgcatcgacctcattgagaagccagcaggccccccgggcattctggccctgctggacgaggagtgctggttccccaaagccaccgacaagagcttcgtggagaaggtgatgcaggagcagggcacccaccccaagttccagaagcccaagcagctgaaggacaaagctgatttctgcattatccactatgccggcaaggtggattacaaagctgacgagtggctgatgaagaacatggatcccctgaatgacaacatcgccacactgctccaccagtcctctgacaagtttgtctcggagctgtggaaggatgtggaccgcatcatcggcctggaccaggtggccggcatgtcggagaccgcactgcccggggccttcaagacgcggaagggcatgttccgcactgtggggcagctttacaaggagcagctggccaagctgatggctacgctgaggaacacgaaccccaactttgtccgctgcatcatccccaaccacgagaagaaggccggcaagctggacccgcatctcgtgctggaccagctgcgctgcaacggtgttctcgagggcatccgtatctgccgccagggcttccccaacagggtggtcttccaggagtttcggcagagatatgagatcctgactccaaactccattcccaagggtttcatggacgggaagcaggcgtgcgtgctcatgataaaagccctggagctcgacagcaatctgtaccgcattggccagagcaaagtcttcttccgtgccggtgtgctggcccacctggaggaggagcgagacctgaagatcaccgacgtcatcatagggttccaggcctgctgcaggggctacctggccaggaaagcatttgccaagcggcagcagcagcttaccgccatgaaggtcctccagcggaactgcgctgcctacctgaagctgcggaactggcagtggtggcggctcttcaccaaggtcaagccgctgctgcaggtgagccggcaggaggaggagatgatggccaaggaggaggagctggtgaaggtcagagagaagcagctggctgcggagaacaggctcacggagatggagacgctgcagtctcagctcatggcagagaaattgcagctgcaggagcagctccaggcagaaaccgagctgtgtgccgaggctgaggagctccgggcccgcctgaccgccaagaagcaggaattagaagagatctgccatgacctagaggccagggtggaggaggaggaggagcgctgccagcacctgcaggcggagaagaagaagatgcagcagaacatccaggagcttgaggagcagctggaggaggaggagagcgcccggcagaagctgcagctggagaaggtgaccaccgaggcgaagctgaaaaagctggaggaggagcagatcatcctggaggaccagaactgcaagctggccaaggaaaagaaactgctggaagacagaatagctgagttcaccaccaacctcacagaagaggaggagaaatctaagagcctcgccaagctcaagaacaagcatgaggcaatgatcactgacttggaagagcgcctccgcagggaggagaagcagcgacaggagctggagaagacccgccggaagctggagggagactccacagacctcagcgaccagatcgccgagctccaggcccagatcgcggagctcaagatgcagctggccaagaaagaggaggagctccaggccgccctggccagagtggaagaggaagctgcccagaagaacatggccctcaagaagatccgggagctggaatctcagatctctgaactccaggaagacctggagtctgagcgtgcttccaggaataaagctgagaagcagaaacgggaccttggggaagagctagaggcgctgaaaacagagttggaggacacgctggattccacagctgcccagcaggagctcaggtcaaaacgtgagcaggaggtgaacatcctgaagaagaccctggaggaggaggccaagacccacgaggcccagatccaggagatgaggcagaagcactcacaggccgtggaggagctggcggagcagctggagcagacgaagcgggtgaaagcaaacctcgagaaggcaaagcagactctggagaacgagcggggggagctggccaacgaggtgaaggtgctgctgcagggcaaaggggactcggagcacaagcgcaagaaagtggaggcgcagctgcaggagctgcaggtcaagttcaacgagggagagcgcgtgcgcacagagctggccgacaaggtcaccaagctgcaggtggagctggacaacgtgaccgggcttctcagccagtccgacagcaagtccagcaagctcaccaaggacttctccgcgctggagtcccagctgcaggacactcaggagctgctgcaggaggagaaccggcagaagctgagcctgagcaccaagctcaagcaggtggaggacgagaagaattccttccgggagcagctggaggaggaggaggaggccaagcacaacctggagaagcagatcgccaccctccatgcccaggtggccgacatgaaaaagaagatggaggacagtgtggggtgcctggaaactgctgaggaggtgaagaggaagctccagaaggacctggagggcctgagccagcggcacgaggagaaggtggccgcctacgacaagctggagaagaccaagacgcggctgcagcaggagctggacgacctgctggtggacctggaccaccagcgccagagcgcgtgcaacctggagaagaagcagaagaagtttgaccagctcctggcggaggagaagaccatctctgccaagtatgcagaggagcgcgaccgggctgaggcggaggcccgagagaaggagaccaaggctctgtcgctggcccgggccctggaggaagccatggagcagaaggcggagctggagcggctcaacaagcagttccgcacggagatggaggaccttatgagctccaaggatgatgtgggcaagagtgtccacgagctggagaagtccaagcgggccctagagcagcaggtggaggagatgaagacgcagctggaagagctggaggacgagctgcaggccaccgaagatgccaagctgcggttggaggtcaacctgcaggccatgaaggcccagttcgagcgggacctgcagggccgggacgagcagagcgaggagaagaagaagcagctggtcagacaggtgcgggagatggaggcagagctggaggacgagaggaagcagcgctcgatggcagtggccgcccggaagaagctggagatggacctgaaggacctggaggcgcacatcgactcggccaacaagaaccgggacgaagccatcaaacagctgcggaagctgcaggcccagatgaaggactgcatgcgcgagctggatgacacccgcgcctctcgtgaggagatcctggcccaggccaaagagaacgagaagaagctgaagagcatggaggccgagatgatccagttgcaggaggaactggcagccgcggagcgtgccaagcgccaggcccagcaggagcgggatgagctggctgacgagatcgccaacagcagcggcaaaggagccctggcgttagaggagaagcggcgtctggaggcccgcatcgcccagctggaggaggagctggaggaggagcagggcaacacggagctgatcaacgaccggctgaagaaggccaacctgcagatcgaccagatcaacaccgacctgaacctggagcgcagccacgcccagaagaacgagaatgctcggcagcagctggaacgccagaacaaggagcttaaggtcaagctgcaggagatggagggcactgtcaagtccaagtacaaggcctccatcaccgccctcgaggccaagattgcacagctggaggagcagctggacaacgagaccaaggagcgccaggcagcctgcaaacaggtgcgtcggaccgagaagaagctgaaggatgtgctgctgcaggtggatgacgagcggaggaacgccgagcagtacaaggaccaggccgacaaggcatctacccgcctgaagcagctcaagcggcagctggaggaggccgaagaggaggcccagcgggccaacgcctcccgccggaaactgcagcgcgagctggaggacgccactgagacggccgatgccatgaaccgcgaagtcagctccctaaagaacaagctcaggcgcggggacctgccgtttgtcgtgccccgccgaatggcccggaaaggcgccggggatggctccgacgaagaggtagatggcaaagcggatggggctgaggccaaacctgccgaataagcctcttctcctgcagcctgagatggatggacagacagacaccacagcctccccttcccagaccccgcagcacgcctctccccaccttcttgggactgctgtgaacatgcctcctcctgccctccgccccgtccccccatcccgtttccctccaggtgttgttgagggcatttggcttcctctgctgcatccccttccagctccctcccctgctcagaatctgataccaaagagacagggcccgggcccaggcagagagcgaccagcaggctcctcagccctctcttgccaaaaagcacaagatgttgaggcgagcagggcaggcccccggggaggggccagagttttctatgaatctatttttcttcagactgaggccttttggtagtcggagcccccgcagtcgtcagcctccctgacgtctgccaccagcgcccccactcctcctcctttctttgctgtttgcaatcacacgtggtgacctcacacacctctgccccttgggcctcccactcccatggctctgggcggtccagaaggagcaggccctgggcctccacctctgtgcagggcacagaaggctggggtggggggaggagtggattcctccccaccctgtcccaggcagcgccactgtccgctgtctccctcctgattctaaaatgtctcaagtgcaatgccccctcccctcctttaccgaggacagcctgcctctgccacagcaaggctgtcggggtcaagctggaaaggccagcagccttccagtggcttctcccaacactcttggggaccaaatatatttaatggttaagggacttgtcccaagtctgacagccagagcgttagaggggccagcggccctcccaggcgatcttgtgtctactctaggactgggcccgagggtggtttacctgcaccgttgactcagtatagtttaaaaatctgccacctgcacaggtatttttgaaagcaaaataaggttttcttttttcccctttcttgtaataaatgataaaattccgagtctttctcactgcctttgtttagaagagagtagctcgtcctcactggtctacactggttgccgaatttacttgtattcctaactgttttgtatatgctgcattgagacttacggcaagaaggcattttttttttttaaaggaaacaaactctcaaatcatgaagtgatataaaagctgcatatgcctacaaagctctgaattcaggtcccagttgctgtcacaaaggagtgagtgaaactcccaccctacccccttttttatataataaaagtgccttagcatgtgttgcagctgtcaccactacagtaagctggtttacagatgttttccactgagcatcacaataaagagaaccatgtgctaaaaaaaaaaaaaaaaaaaa

SEQ ID NO: 70 - protein, 1960 aa, Homo sapiens
  MISC_FEATURE (1)..(1960): myosin, heavy chain 9, non-muscle (MYH9)
MAQQAADKYLYVDKNFINNPLAQADWAAKKLVWVPSDKSGFEPASLKEEVGEEAIVELVENGKKVKVNKDDIQKMNPPKFSKVEDMAELTCLNEASVLHNLKERYYSGLIYTYSGLFCVVINPYKNLPIYSEEIVEMYKGKKRHEMPPHIYAITDTAYRSMMQDREDQSILCTGESGAGKTENTKKVIQYLAYVASSHKSKKDQGELERQLLQANPILEAFGNAKTVKNDNSSRFGKFIRINFDVNGYIVGANIETYLLEKSRAIRQAKEERTFHIFYYLLSGAGEHLKTDLLLEPYNKYRFLSNGHVTIPGQQDKDMFQETMEAMRIMGIPEEEQMGLLRVISGVLQLGNIVFKKERNTDQASMPDNTAAQKVSHLLGINVTDFTRGILTPRIKVGRDYVQKAQTKEQADFAIEALAKATYERMFRWLVLRINKALDKTKRQGASFIGILDIAGFEIFDLNSFEQLCINYTNEKLQQLFNHTMFILEQEEYQREGIEWNFIDFGLDLQPCIDLIEKPAGPPGILALLDEECWFPKATDKSFVEKVMQEQGTHPKFQKPKQLKDKADFCIIHYAGKVDYKADEWLMKNMDPLNDNIATLLHQSSDKFVSELWKDVDRIIGLDQVAGMSETALPGAFKTRKGMFRTVGQLYKEQLAKLMATLRNTNPNFVRCIIPNHEKKAGKLDPHLVLDQLRCNGVLEGIRICRQGFPNRVVFQEFRQRYEILTPNSIPKGFMDGKQACVLMIKALELDSNLYRIGQSKVFFRAGVLAHLEEERDLKITDVIIGFQACCRGYLARKAFAKRQQQLTAMKVLQRNCAAYLKLRNWQWWRLFTKVKPLLQVSRQEEEMMAKEEELVKVREKQLAAENRLTEMETLQSQLMAEKLQLQEQLQAETELCAEAEELRARLTAKKQELEEICHDLEARVEEEEERCQHLQAEKKKMQQNIQELEEQLEEEESARQKLQLEKVTTEAKLKKLEEEQIILEDQNCKLAKEKKLLEDRIAEFTTNLTEEEEKSKSLAKLKNKHEAMITDLEERLRREEKQRQELEKTRRKLEGDSTDLSDQIAELQAQIAELKMQLAKKEEELQAALARVEEEAAQKNMALKKIRELESQISELQEDLESERASRNKAEKQKRDLGEELEALKTELEDTLDSTAAQQELRSKREQEVNILKKTLEEEAKTHEAQIQEMRQKHSQAVEELAEQLEQTKRVKANLEKAKQTLENERGELANEVKVLLQGKGDSEHKRKKVEAQLQELQVKFNEGERVRTELADKVTKLQVELDNVTGLLSQSDSKSSKLTKDFSALESQLQDTQELLQEENRQKLSLSTKLKQVEDEKNSFREQLEEEEEAKHNLEKQIATLHAQVADMKKKMEDSVGCLETAEEVKRKLQKDLEGLSQRHEEKVAAYDKLEKTKTRLQQELDDLLVDLDHQRQSACNLEKKQKKFDQLLAEEKTISAKYAEERDRAEAEAREKETKALSLARALEEAMEQKAELERLNKQFRTEMEDLMSSKDDVGKSVHELEKSKRALEQQVEEMKTQLEELEDELQATEDAKLRLEVNLQAMKAQFERDLQGRDEQSEEKKKQLVRQVREMEAELEDERKQRSMAVAARKKLEMDLKDLEAHIDSANKNRDEAIKQLRKLQAQMKDCMRELDDTRASREEILAQAKENEKKLKSMEAEMIQLQEELAAAERAKRQAQQERDELADEIANSSGKGALALEEKRRLEARIAQLEEELEEEQGNTELINDRLKKANLQIDQINTDLNLERSHAQKNENARQQLERQNKELKVKLQEMEGTVKSKYKASITALEAKIAQLEEQLDNETKERQAACKQVRRTEKKLKDVLLQVDDERRNAEQYKDQADKASTRLKQLKRQLEEAEEEAQRANASRRKLQRELEDATETADAMNREVSSLKNKLRRGDLPFVVPRRMARKGAGDGSDEEVDGKADGAEAKPAE

SEQ ID NO: 71 - DNA, 7619 bp, Homo sapiens
  misc_feature (1)..(7619): myosin, heavy chain 10, non-muscle (MYH10)
actgaggcgctggatctgtggtcgcggctggggacgtgcgcccgcgccaccatcttcggctgaagaggcaattgcttttggatcgttccatttacaatggcgcagagaactggactcgaggatccagagaggtatctctttgtggacagggctgtcatctacaaccctgccactcaagctgattggacagctaaaaagctagtgtggattccatcagaacgccatggttttgaggcagctagtatcaaagaagaacggggagatgaagttatggtggagttggcagagaatggaaagaaagcaatggtcaacaaagatgatattcagaagatgaacccacctaagttttccaaggtggaggatatggcagaattgacatgcttgaatgaagcttccgttttacataatctgaaggatcgctactattcaggactaatctatacttattctggactcttctgtgtagttataaacccttacaagaatcttccaatttactctgagaatattattgaaatgtacagagggaagaagcgtcatgagatgcctccacacatctatgctatatctgaatctgcttacagatgcatgcttcaagatcgtgaggaccagtcaattctttgcacgggtgagtcaggtgctgggaagacagaaaatacaaagaaagttattcagtaccttgcccatgttgcttcttcacataaaggaagaaaggaccataatattcctggggaacttgaacggcagcttttgcaagcaaatccaattctggaatcatttggaaatgcgaagactgtgaaaaatgataactcatctcgttttggcaaatttattcggatcaactttgatgtaactggctatatcgttggggccaacattgaaacataccttctggaaaagtctcgtgctgttcgtcaagcaaaagatgaacgtacttttcatatcttttaccagttgttatctggagcaggagaacacctaaagtctgatttgcttcttgaaggatttaataactacaggtttctctccaatggctatattcctattccgggacagcaagacaaagataatttccaggagaccatggaagcaatgcacataatgggcttctcccatgaagagattctgtcaatgcttaaagtagtatcttcagtgctacagtttggaaatatttctttcaaaaaggagagaaatactgatcaagcttccatgccagaaaatacagttgcgcagaagctctgccatcttcttgggatgaatgtgatggagtttactcgggccatcctgactccccggatcaaggtcggccgagactatgtgcaaaaagcccagaccaaagaacaggcagattttgcagtagaagcattggcaaaagctacctatgagcggctctttcgctggctcgttcatcgcatcaataaagctctggataggaccaaacgtcagggagcatctttcattggaatcctggatattgctggatttgaaatttttgagctgaactcctttgaacaactttgcatcaactacaccaatgagaagctgcagcagctgttcaaccacaccatgtttatcctagaacaagaggaataccagcgcgaaggcatcgagtggaacttcatcgatttcgggctggatctgcagccatgcatcgacctaatagagagacctgcgaaccctcctggtgtactggcccttttggatgaagaatgctggttccctaaagccacagataaaacctttgttgaaaaactggttcaagagcaaggttcccactccaagtttcagaaacctcgacaattaaaagacaaagctgatttttgcattatacattatgcagggaaggtggactataaggcagatgagtggctgatgaagaatatggaccccctgaatgacaacgtggccacccttttgcaccagtcatcagacagatttgtggcagagctttggaaagatgtggaccgtatcgtgggtctggatcaagtcactggtatgactgagacagcttttggctccgcatataaaaccaagaagggcatgtttcgtaccgttgggcaactctacaaagaatctctcaccaagctgatggcaactctccgaaacaccaaccctaactttgttcgttgtatcattccaaatcacgagaagagggctggaaaattggatccacacctagtcctagatcagcttcgctgtaatggtgtcctggaagggatccgaatctgtcgccagggcttccctaaccgaatagttttccaggaattcagacagagatatgagatcctaactccaaatgctattcctaaaggttttatggatggtaaacaggcctgtgaacgaatgatccgggctttagaattggacccaaacttgtacagaattggacagagcaagatatttttcagagctggagttctggcacacttagaggaagaaagagatttaaaaatcaccgatatcattatcttcttccaggccgtttgcagaggttacctggccagaaaggcctttgccaagaagcagcagcaactaagtgccttaaaggtcttgcagcggaactgtgccgcgtacctgaaattacggcactggcagtggtggcgagtcttcacaaaggtgaagccgcttctacaagtgactcgccaggaggaagaacttcaggccaaagatgaagagctgttgaaggtgaaggagaagcagacgaaggtggaaggagagctggaggagatggagcggaagcaccagcagcttttagaagagaagaatatccttgcagaacaactacaagcagagactgagctctttgctgaagcagaagagatgagggcaagacttgctgctaaaaagcaggaattagaagagattctacatgacttggagtctagggttgaagaagaagaagaaagaaaccaaatcctccaaaatgaaaagaaaaaaatgcaagcacatattcaggacctggaagaacagctagacgaggaggaaggggctcggcaaaagctgcagctggaaaaggtgacagcagaggccaagatcaagaagatggaagaggagattctgcttctcgaggaccaaaattccaagttcatcaaagaaaagaaactcatggaagatcgcattgctgagtgttcctctcagctggctgaagaggaagaaaaggcgaaaaacttggccaaaatcaggaataagcaagaagtgatgatctcagatttagaagaacgcttaaagaaggaagaaaagactcgtcaggaactggaaaaggccaaaagaaaactcgacggggagacgaccgacctgcaggaccagatcgcagagctgcaggcgcagattgatgagctcaagctgcagctggccaagaaggaggaggagctgcagggcgcactggccagaggtgatgatgaaacactccataagaacaatgcccttaaagttgtgcgagagctacaagcccaaattgctgaacttcaggaagactttgaatccgagaaggcttcacggaacaaggccgaaaagcagaaaagggacttgagtgaggaactggaagctctgaaaacagagctggaggacacgctggacaccacggcagcccagcaggaactacgtacaaaacgtgaacaagaagtggcagagctgaagaaagctcttgaggaggaaactaagaaccatgaagctcaaatccaggacatgagacaaagacacgcaacagccctggaggagctctcagagcagctggaacaggccaagcggttcaaagcaaatctagagaagaacaagcagggcctggagacagataacaaggagctggcgtgtgaggtgaaggtcctgcagcaggtcaaggctgagtctgagcacaagaggaagaagctcgacgcgcaggtccaggagctccatgccaaggtctctgaaggcgacaggctcagggtggagctggcggagaaagcaagtaagctgcagaatgagctagataatgtctccacccttctggaagaagcagagaagaagggtattaaatttgctaaggatgcagctagtcttgagtctcaactacaggatacacaggagcttcttcaggaggagacacgccagaaactaaacctgagcagtcggatccggcagctggaagaggagaagaacagtcttcaggagcagcaggaggaggaggaggaggccaggaagaacctggagaagcaagtgctggccctgcagtcccagttggctgataccaagaagaaagtagatgacgacctgggaacaattgaaagtctggaagaagccaagaagaagcttctgaaggacgcggaggccctgagccagcgcctggaggagaaggcactggcgtatgacaaactggagaagaccaagaaccgcctgcagcaggagctggacgacctcacggtggacctggaccaccagcgccaggtcgcctccaacttggagaagaagcagaagaagtttgaccagctgttagcagaagagaagagcatctctgctcgctatgccgaagagcgggaccgggccgaagccgaggccagagagaaagaaaccaaagccctgtcactggcccgggccctcgaggaagccctggaggccaaggaggagtttgagaggcagaacaagcagctccgagcagacatggaagacctcatgagctccaaagatgatgtgggaaaaaacgttcacgaacttgaaaaatccaaacgggccctagagcagcaggtggaggaaatgaggacccagctggaggagctggaagacgaactccaggccacggaagatgccaagcttcgtctggaggtcaacatgcaggccatgaaggcgcagttcgagagagacctgcaaaccagggatgagcagaatgaagagaagaagcggctgctgatcaaacaggtgcgggagctcgaggcggagctggaggatgagaggaaacagcgggcgcttgctgtagcttcaaagaaaaagatggagatagacctgaaggacctcgaagcccaaatcgaggctgcgaacaaagctcgggatgaggtgattaagcagctccgcaagctccaggctcagatgaaggattaccaacgtgaattagaagaagctcgtgcatccagagatgagatttttgctcaatccaaagagagtgaaaagaaattgaagagtctggaagcagaaatccttcaattgcaggaggaacttgcctcatctgagcgagcccgccgacacgccgagcaggagagagatgagctggcggacgagatcaccaacagcgcctctggcaagtccgcgctgctggatgagaagcggcgtctggaagctcggatcgcacagctggaggaggagctggaagaggagcagagcaacatggagctgctcaacgaccgcttccgcaagaccactctacaggtggacacactgaacgccgagctagcagccgagcgcagcgccgcccagaagagtgacaatgcacgccagcaactggagcggcagaacaaggagctgaaggccaagctgcaggaactcgagggtgctgtcaagtctaagttcaaggccaccatctcagccctggaggccaagattgggcagctggaggagcagcttgagcaggaagccaaggaacgagcagccgccaacaaattagtccgtcgcactgagaagaagctgaaagaaatcttcatgcaggttgaggatgagcgtcgacacgcggaccagtataaagagcagatggagaaggccaacgctcggatgaagcagcttaaacgccagctggaggaagcagaagaagaagcgacgcgtgccaacgcatctcggcgtaaactccagcgggaactggatgatgccaccgaggccaacgagggcctgagccgcgaggtcagcaccctgaagaaccggctgaggcggggtggccccatcagcttctcttccagccgatctggccggcgccagctgcaccttgaaggagcttccctggagctctccgacgatgacacagaaagtaagaccagtgatgtcaacgagacgcagccaccccagtcagagtaaagttgcaggaagccagaggaggcaatacagtgggacagttaggaatgcacccggggcctcctgcagatttcggaaattggcaagctacgggattccttcctgaaagatcaactgtgtcttaaggctctccagcctatgcatactgtatcctgcttcagacttaggtacaattgctcccctttttatatatagacacacacaggacacatatattaaacagattgtttcatcattgcatctattttccatatagtcatcaagagaccattttataaaacatggtaagaccctttttaaaacaaactccaggcccttggttgcgggtcgctgggttattggggcagcgccgtggtcgtcactcagtcgctctgcatgctctctgtcatacagacaggtaacctagttctgtgttcacgtggcccccgactcctcagccacatcaagtctcctagaccactgtggactctaaactgcacttgtctctctcatttccttcaaataatgatcaatgctatttcagtgagcaaactgtgaaaggggctttggaaagagtaggaggggtgggctggatcggaagcaacacccatttggggttaccatgtccatcccccaaggggggccctgcccctcgagtcgatggtgtcccgcatctactcatgtgaactggccttggcgagggctggtctgtgcatagaagggatagtggccacactgcagctgaggccccaggtggcagccatggatcatgtagacttccagatggtctcccgaaccgcctggctctgccggcgccctcctcacgtcaggagcaagcagccgtggacccctaagccgagctggtggaaggcccctccctgtcgccagccgggccctcatgctgaccttgcaaattcagccgctgctttgagcccaaaatgggaatattggttttgtgtccgaggcttgttccaagtttgtcaatgaggtttatggagcctccagaacagatgccatcttcctgaatgttgacatgccagtgggtgtgactccttcatttttccttctcccttccctttggacagtgttacagtgaacacttagcatcctgtttttggttggtagttaagcaaactgacattacggaaagtgccttagacactacagtactaagacaatgttgaatatatcattcgcctctataacaatttaatgtattcagttttgactgtgcttcatatcatgtacctctctagtcaaagtggtattacagacattcagtgacaatgaatcagtgttaattctaaatccttgatcctctgcaatgtgcttgaaaacacaaaccttttgggttaaaagctttaacatctattaggaagaatttgtcctgtgggtttggaatcttggattttccccctttatgaactgtactggctgttgaccaccagacacctgaccgcaaatatcttttcttgtattcccatatttctagacaatgatttttgtaagacaataaatttattcattatagatatttgcgcctgctctgtttacttgaagaaaaaagcacccgtggagaataaagagacctcaataaacaagaataatcatgtgaa

SEQ ID NO: 72 - protein, 1976 aa, Homo sapiens
  MISC_FEATURE (1)..(1976): myosin, heavy chain 10, non-muscle (MYH10)
MAQRTGLEDPERYLFVDRAVIYNPATQADWTAKKLVWIPSERHGFEAASIKEERGDEVMVELAENGKKAMVNKDDIQKMNPPKFSKVEDMAELTCLNEASVLHNLKDRYYSGLIYTYSGLFCVVINPYKNLPIYSENIIEMYRGKKRHEMPPHIYAISESAYRCMLQDREDQSILCTGESGAGKTENTKKVIQYLAHVASSHKGRKDHNIPGELERQLLQANPILESFGNAKTVKNDNSSRFGKFIRINFDVTGYIVGANIETYLLEKSRAVRQAKDERTFHIFYQLLSGAGEHLKSDLLLEGFNNYRFLSNGYIPIPGQQDKDNFQETMEAMHIMGFSHEEILSMLKVVSSVLQFGNISFKKERNTDQASMPENTVAQKLCHLLGMNVMEFTRAILTPRIKVGRDYVQKAQTKEQADFAVEALAKATYERLFRWLVHRINKALDRTKRQGASFIGILDIAGFEIFELNSFEQLCINYTNEKLQQLFNHTMFILEQEEYQREGIEWNFIDFGLDLQPCIDLIERPANPPGVLALLDEECWFPKATDKTFVEKLVQEQGSHSKFQKPRQLKDKADFCIIHYAGKVDYKADEWLMKNMDPLNDNVATLLHQSSDRFVAELWKDVDRIVGLDQVTGMTETAFGSAYKTKKGMFRTVGQLYKESLTKLMATLRNTNPNFVRCIIPNHEKRAGKLDPHLVLDQLRCNGVLEGIRICRQGFPNRIVFQEFRQRYEILTPNAIPKGFMDGKQACERMIRALELDPNLYRIGQSKIFFRAGVLAHLEEERDLKITDIIIFFQAVCRGYLARKAFAKKQQQLSALKVLQRNCAAYLKLRHWQWWRVFTKVKPLLQVTRQEEELQAKDEELLKVKEKQTKVEGELEEMERKHQQLLEEKNILAEQLQAETELFAEAEEMRARLAAKKQELEEILHDLESRVEEEEERNQILQNEKKKMQAHIQDLEEQLDEEEGARQKLQLEKVTAEAKIKKMEEEILLLEDQNSKFIKEKKLMEDRIAECSSQLAEEEEKAKNLAKIRNKQEVMISDLEERLKKEEKTRQELEKAKRKLDGETTDLQDQIAELQAQIDELKLQLAKKEEELQGALARGDDETLHKNNALKVVRELQAQIAELQEDFESEKASRNKAEKQKRDLSEELEALKTELEDTLDTTAAQQELRTKREQEVAELKKALEEETKNHEAQIQDMRQRHATALEELSEQLEQAKRFKANLEKNKQGLETDNKELACEVKVLQQVKAESEHKRKKLDAQVQELHAKVSEGDRLRVELAEKASKLQNELDNVSTLLEEAEKKGIKFAKDAASLESQLQDTQELLQEETRQKLNLSSRIRQLEEEKNSLQEQQEEEEEARKNLEKQVLALQSQLADTKKKVDDDLGTIESLEEAKKKLLKDAEALSQRLEEKALAYDKLEKTKNRLQQELDDLTVDLDHQRQVASNLEKKQKKFDQLLAEEKSISARYAEERDRAEAEAREKETKALSLARALEEALEAKEEFERQNKQLRADMEDLMSSKDDVGKNVHELEKSKRALEQQVEEMRTQLEELEDELQATEDAKLRLEVNMQAMKAQFERDLQTRDEQNEEKKRLLIKQVRELEAELEDERKQRALAVASKKKMEIDLKDLEAQIEAANKARDEVIKQLRKLQAQMKDYQRELEEARASRDEIFAQSKESEKKLKSLEAEILQLQEELASSERARRHAEQERDELADEITNSASGKSALLDEKRRLEARIAQLEEELEEEQSNMELLNDRFRKTTLQVDTLNAELAAERSAAQKSDNARQQLERQNKELKAKLQELEGAVKSKFKATISALEAKIGQLEEQLEQEAKERAAANKLVRRTEKKLKEIFMQVEDERRHADQYKEQMEKANARMKQLKRQLEEAEEEATRANASRRKLQRELDDATEANEGLSREVSTLKNRLRRGGPISFSSSRSGRRQLHLEGASLELSDDDTESKTSDVNETQPPQSE

SEQ ID NO: 73 - DNA, 6882 bp, Homo sapiens
  misc_feature (1)..(6882): myosin, heavy chain 11, smooth muscle (MYH11),transcript variant SM1A
gggagatttggacgctccggcctgggaggtgcgtcagatccgagctcgccatccagtttcctctccactagtccccccagttggagatctgggaccaacaaggcaccatggcgcagaagggccaactcagtgacgatgagaagttcctctttgtggacaaaaacttcatcaacagcccagtggcccaggctgactgggccgccaagagactcgtctgggtcccctcggagaagcagggcttcgaggcagccagcattaaggaggagaagggggatgaggtggttgtggagctggtggagaatggcaagaaggtcacggttgggaaagatgacatccagaagatgaacccacccaagttctccaaggtggaggacatggcggagctgacgtgcctcaacgaagcctccgtgctacacaacctgagggagcggtacttctcagggctaatatatacgtactctggcctcttctgcgtggtggtcaacccctataaacacctgcccatctactcggagaagatcgtcgacatgtacaagggcaagaagaggcacgagatgccgcctcacatctacgccatcgcagacacggcctaccggagcatgcttcaagatcgggaggaccagtccattctatgcacaggcgagtctggagccgggaaaaccgaaaacaccaagaaggtcattcagtacctggccgtggtggcctcctcccacaagggcaagaaagacacaagtatcacgggagagctggaaaagcagcttctacaagcaaacccgattctggaggctttcggcaacgccaaaacagtgaagaacgacaactcctcacgattcggcaaattcatccgcatcaacttcgacgtcacgggttacatcgtgggagccaacattgagacctatctgctagaaaaatcacgggcaattcgccaagccagagacgagaggacattccacatcttttactacatgattgctggagccaaggagaagatgagaagtgacttgcttttggagggcttcaacaactacaccttcctctccaatggctttgtgcccatcccagcagcccaggatgatgagatgttccaggaaaccgtggaggccatggcaatcatgggtttcagcgaggaggagcagctatccatattgaaggtggtatcatcggtcctgcagcttggaaatatcgtcttcaagaaggaaagaaacacagaccaggcgtccatgccagataacacagctgctcagaaagtttgccacctcatgggaattaatgtgacagatttcaccagatccatcctcactcctcgtatcaaggttgggcgagatgtggtacagaaagctcagacaaaagaacaggctgactttgctgtagaggctttggccaaggcaacatatgagcgccttttccgctggatactcacccgcgtgaacaaagccctggacaagacccatcggcaaggggcttccttcctggggatcctggatatagctggatttgagatctttgaggtgaactccttcgagcagctgtgcatcaactacaccaacgagaagctgcagcagctcttcaaccacaccatgttcatcctggagcaggaggagtaccagcgcgagggcatcgagtggaacttcatcgactttgggctggacctacagccctgcatcgagctcatcgagcgaccgaacaaccctccaggtgtgctggccctgctggacgaggaatgctggttccccaaagccacggacaagtctttcgtggagaagctgtgcacggagcagggcagccaccccaagttccagaagcccaagcagctcaaggacaagactgagttctccatcatccattatgctgggaaggtggactataatgcgagtgcctggctgaccaagaatatggacccgctgaatgacaacgtgacttccctgctcaatgcctcctccgacaagtttgtggccgacctgtggaaggacgtggaccgcatcgtgggcctggaccagatggccaagatgacggagagctcgctgcccagcgcctccaagaccaagaagggcatgttccgcacagtggggcagctgtacaaggagcagctgggcaagctgatgaccacgctacgcaacaccacgcccaacttcgtgcgctgcatcatccccaaccacgagaagaggtccggcaagctggatgcgttcctggtgctggagcagctgcggtgcaatggggtgctggaaggcattcgcatctgccggcagggcttccccaaccggatcgtcttccaggagttccgccaacgctacgagatcctggcggcgaatgccatccccaaaggcttcatggacgggaagcaggcctgcattctcatgatcaaagccctggaacttgaccccaacttatacaggatagggcagagcaaaatcttcttccgaactggcgtcctggcccacctagaggaggagcgagatttgaagatcaccgatgtcatcatggccttccaggcgatgtgtcgtggctacttggccagaaaggcttttgccaagaggcagcagcagctgaccgccatgaaggtgattcagaggaactgcgccgcctacctcaagctgcggaactggcagtggtggaggcttttcaccaaagtgaagccactgctgcaggtgacacggcaggaggaggagatgcaggccaaggaggatgaactgcagaagaccaaggagcggcagcagaaggcagagaatgagcttaaggagctggaacagaagcactcgcagctgaccgaggagaagaacctgctacaggaacagctgcaggcagagacagagctgtatgcagaggctgaggagatgcgggtgcggctggcggccaagaagcaggagctggaggagatactgcatgagatggaggcccgcctggaggaggaggaagacaggggccagcagctacaggctgaaaggaagaagatggcccagcagatgctggaccttgaagaacagctggaggaggaggaagctgccaggcagaagctgcaacttgagaaggtcacggctgaggccaagatcaagaaactggaggatgagatcctggtcatggatgatcagaacaataaactatcaaaagaacgaaaactccttgaggagaggattagtgacttaacgacaaatcttgcagaagaggaagaaaaggccaagaatcttaccaagctgaaaaacaagcatgaatctatgatttcagaactggaagtgcggctaaagaaggaagagaagagccgacaggagctggagaagctgaaacggaagctggagggtgatgccagcgacttccacgagcagatcgctgacctccaggcgcagatcgcagagctcaagatgcagctggccaagaaggaggaggagctgcaggcggccctggccaggcttgacgatgaaatcgctcagaagaacaatgccctgaagaagatccgggagctggagggccacatctcagacctccaggaggacctggactcagagcgggccgccaggaacaaggctgaaaagcagaagcgagacctcggcgaggagctggaggccctaaagacagagctggaagacacactggacagcacagccactcagcaggagctcagggccaagagggagcaggaggtgacggtgctgaagaaggccctggatgaagagacgcggtcccatgaggctcaggtccaggagatgaggcagaaacacgcacaggcggtggaggagctcacagagcagcttgagcagttcaagagggccaaggcgaacctagacaagaataagcagacgctggagaaagagaacgcagacctggccggggagctgcgggtcctgggccaggccaagcaggaggtggaacataagaagaagaagctggaggcgcaggtgcaggagctgcagtccaagtgcagcgatggggagcgggcccgggcggagctcaatgacaaagtccacaagctgcagaatgaagttgagagcgtcacagggatgcttaacgaggccgaggggaaggccattaagctggccaaggacgtggcgtccctcagttcccagctccaggacacccaggagctgcttcaagaagaaacccggcagaagctcaacgtgtctacgaagctgcgccagctggaggaggagcggaacagcctgcaagaccagctggacgaggagatggaggccaagcagaacctggagcgccacatctccactctcaacatccagctctccgactcgaagaagaagctgcaggactttgccagcaccgtggaagctctggaagaggggaagaagaggttccagaaggagatcgagaacctcacccagcagtacgaggagaaggcggccgcttatgataaactggaaaagaccaagaacaggcttcagcaggagctggacgacctggttgttgatttggacaaccagcggcaactcgtgtccaacctggaaaagaagcagaggaaatttgatcagttgttagccgaggagaaaaacatctcttccaaatacgcggatgagagggacagagctgaggcagaagccagggagaaggaaaccaaggccctgtccctggctcgggcccttgaagaggccttggaagccaaagaggaactcgagcggaccaacaaaatgctcaaagccgaaatggaagacctggtcagctccaaggatgacgtgggcaagaacgtccatgagctggagaagtccaagcgggccctggagacccagatggaggagatgaagacgcagctggaagagctggaggacgagctgcaagccacggaggacgccaaactgcggctggaagtcaacatgcaggcgctcaagggccagttcgaaagggatctccaagcccgggacgagcagaatgaggagaagaggaggcaactgcagagacagcttcacgagtatgagacggaactggaagacgagcgaaagcaacgtgccctggcagctgcagcaaagaagaagctggaaggggacctgaaagacctggagcttcaggccgactctgccatcaaggggagggaggaagccatcaagcagctacgcaaactgcaggctcagatgaaggactttcaaagagagctggaagatgcccgtgcctccagagatgagatctttgccacagccaaagagaatgagaagaaagccaagagcttggaagcagacctcatgcagctacaagaggacctcgccgccgctgagagggctcgcaaacaagcggacctcgagaaggaggaactggcagaggagctggccagtagcctgtcgggaaggaacgcactccaggacgagaagcgccgcctggaggcccggatcgcccagctggaggaggagctggaggaggagcagggcaacatggaggccatgagcgaccgggtccgcaaagccacacagcaggccgagcagctcagcaacgagctggccacagagcgcagcacggcccagaagaatgagagtgcccggcagcagctcgagcggcagaacaaggagctccggagcaagctccacgagatggagggggccgtcaagtccaagttcaagtccaccatcgcggcgctggaggccaagattgcacagctggaggagcaggtcgagcaggaggccagagagaaacaggcggccaccaagtcgctgaagcagaaagacaagaagctgaaggaaatcttgctgcaggtggaggacgagcgcaagatggccgagcagtacaaggagcaggcagagaaaggcaatgccagggtcaagcagctcaagaggcagctggaggaggcagaggaggagtcccagcgcatcaacgccaaccgcaggaagctgcagcgggagctggatgaggccacggagagcaacgaggccatgggccgcgaggtgaacgcactcaagagcaagctcaggcgaggaaacgagacctctttcgttccttctagaaggtctggaggacgtagagttattgaaaatgcagatggttctgaggaggaaacggacactcgagacgcagacttcaatggaaccaaggccagtgaataagcaactttctacagttttgcaccacggcaagaaaaccaaaaaccaaaacaaacaaacaaaaaaaacccaacaacaacccagaacaaagcaaaacccagcagactgtacttagcattgtctaaatccattctcaaattccaaatatcacagacacccctcacacaaggaatataaaaaccaccaccctccagcctgggcaacgtagtaaaacctcatctatacaagaatttaaaaataagctgggcgtggtggtacacacctgtggtcccagctactagggaggctgagccaggaagaacgctccagcccaggacttcgaggctgcaatgagctataattgcatcattgcactccagcctgggcaacagagaccctgtctcaaccaccaccaccaccaccacccctactacccctgtattcaaggtaaaaattgaagtttgtatgatgtaagagatgagaaaaacccaacaggaaacacagacacatcctccagttctatcaatggattgtgcagacactgagtttttagaaaaacatatccacggtaaccggtccctggcaattctgtttacatgaaatggggagaaagtcaccgaaatgggtgccgccggcccccactcccaattcattccctaacctgcaaacctttccaacttctcacgtcaggcctttgagaattctttccccctctcctggtttccacacctcagacacgcacagttcaccaagtgccttctgtagtcacatgaattgaaaaggagacgctgctcccacggaggggagcaggaatgctgcactgtttacaccctgactgtgcttaaaaacactttcactaataaatggttataaatcacaa

SEQ ID NO: 74 - protein, 1972 aa, Homo sapiens
  MISC_FEATURE (1)..(1972): myosin, heavy chain 11, smooth muscle (MYH11),transcript variant SM1A
MAQKGQLSDDEKFLFVDKNFINSPVAQADWAAKRLVWVPSEKQGFEAASIKEEKGDEVVVELVENGKKVTVGKDDIQKMNPPKFSKVEDMAELTCLNEASVLHNLRERYFSGLIYTYSGLFCVVVNPYKHLPIYSEKIVDMYKGKKRHEMPPHIYAIADTAYRSMLQDREDQSILCTGESGAGKTENTKKVIQYLAVVASSHKGKKDTSITGELEKQLLQANPILEAFGNAKTVKNDNSSRFGKFIRINFDVTGYIVGANIETYLLEKSRAIRQARDERTFHIFYYMIAGAKEKMRSDLLLEGFNNYTFLSNGFVPIPAAQDDEMFQETVEAMAIMGFSEEEQLSILKVVSSVLQLGNIVFKKERNTDQASMPDNTAAQKVCHLMGINVTDFTRSILTPRIKVGRDVVQKAQTKEQADFAVEALAKATYERLFRWILTRVNKALDKTHRQGASFLGILDIAGFEIFEVNSFEQLCINYTNEKLQQLFNHTMFILEQEEYQREGIEWNFIDFGLDLQPCIELIERPNNPPGVLALLDEECWFPKATDKSFVEKLCTEQGSHPKFQKPKQLKDKTEFSIIHYAGKVDYNASAWLTKNMDPLNDNVTSLLNASSDKFVADLWKDVDRIVGLDQMAKMTESSLPSASKTKKGMFRTVGQLYKEQLGKLMTTLRNTTPNFVRCIIPNHEKRSGKLDAFLVLEQLRCNGVLEGIRICRQGFPNRIVFQEFRQRYEILAANAIPKGFMDGKQACILMIKALELDPNLYRIGQSKIFFRTGVLAHLEEERDLKITDVIMAFQAMCRGYLARKAFAKRQQQLTAMKVIQRNCAAYLKLRNWQWWRLFTKVKPLLQVTRQEEEMQAKEDELQKTKERQQKAENELKELEQKHSQLTEEKNLLQEQLQAETELYAEAEEMRVRLAAKKQELEEILHEMEARLEEEEDRGQQLQAERKKMAQQMLDLEEQLEEEEAARQKLQLEKVTAEAKIKKLEDEILVMDDQNNKLSKERKLLEERISDLTTNLAEEEEKAKNLTKLKNKHESMISELEVRLKKEEKSRQELEKLKRKLEGDASDFHEQIADLQAQIAELKMQLAKKEEELQAALARLDDEIAQKNNALKKIRELEGHISDLQEDLDSERAARNKAEKQKRDLGEELEALKTELEDTLDSTATQQELRAKREQEVTVLKKALDEETRSHEAQVQEMRQKHAQAVEELTEQLEQFKRAKANLDKNKQTLEKENADLAGELRVLGQAKQEVEHKKKKLEAQVQELQSKCSDGERARAELNDKVHKLQNEVESVTGMLNEAEGKAIKLAKDVASLSSQLQDTQELLQEETRQKLNVSTKLRQLEEERNSLQDQLDEEMEAKQNLERHISTLNIQLSDSKKKLQDFASTVEALEEGKKRFQKEIENLTQQYEEKAAAYDKLEKTKNRLQQELDDLVVDLDNQRQLVSNLEKKQRKFDQLLAEEKNISSKYADERDRAEAEAREKETKALSLARALEEALEAKEELERTNKMLKAEMEDLVSSKDDVGKNVHELEKSKRALETQMEEMKTQLEELEDELQATEDAKLRLEVNMQALKGQFERDLQARDEQNEEKRRQLQRQLHEYETELEDERKQRALAAAAKKKLEGDLKDLELQADSAIKGREEAIKQLRKLQAQMKDFQRELEDARASRDEIFATAKENEKKAKSLEADLMQLQEDLAAAERARKQADLEKEELAEELASSLSGRNALQDEKRRLEARIAQLEEELEEEQGNMEAMSDRVRKATQQAEQLSNELATERSTAQKNESARQQLERQNKELRSKLHEMEGAVKSKFKSTIAALEAKIAQLEEQVEQEAREKQAATKSLKQKDKKLKEILLQVEDERKMAEQYKEQAEKGNARVKQLKRQLEEAEEESQRINANRRKLQRELDEATESNEAMGREVNALKSKLRRGNETSFVPSRRSGGRRVIENADGSEEETDTRDADFNGTKASE

SEQ ID NO: 75 - DNA, 6903 bp, Homo sapiens
  misc_feature (1)..(6903): myosin, heavy chain 11, smooth muscle (MYH11),transcript variant SM1B
gggagatttggacgctccggcctgggaggtgcgtcagatccgagctcgccatccagtttcctctccactagtccccccagttggagatctgggaccaacaaggcaccatggcgcagaagggccaactcagtgacgatgagaagttcctctttgtggacaaaaacttcatcaacagcccagtggcccaggctgactgggccgccaagagactcgtctgggtcccctcggagaagcagggcttcgaggcagccagcattaaggaggagaagggggatgaggtggttgtggagctggtggagaatggcaagaaggtcacggttgggaaagatgacatccagaagatgaacccacccaagttctccaaggtggaggacatggcggagctgacgtgcctcaacgaagcctccgtgctacacaacctgagggagcggtacttctcagggctaatatatacgtactctggcctcttctgcgtggtggtcaacccctataaacacctgcccatctactcggagaagatcgtcgacatgtacaagggcaagaagaggcacgagatgccgcctcacatctacgccatcgcagacacggcctaccggagcatgcttcaagatcgggaggaccagtccattctatgcacaggcgagtctggagccgggaaaaccgaaaacaccaagaaggtcattcagtacctggccgtggtggcctcctcccacaagggcaagaaagacacaagtatcacgcaaggcccatcttttgcctacggagagctggaaaagcagcttctacaagcaaacccgattctggaggctttcggcaacgccaaaacagtgaagaacgacaactcctcacgattcggcaaattcatccgcatcaacttcgacgtcacgggttacatcgtgggagccaacattgagacctatctgctagaaaaatcacgggcaattcgccaagccagagacgagaggacattccacatcttttactacatgattgctggagccaaggagaagatgagaagtgacttgcttttggagggcttcaacaactacaccttcctctccaatggctttgtgcccatcccagcagcccaggatgatgagatgttccaggaaaccgtggaggccatggcaatcatgggtttcagcgaggaggagcagctatccatattgaaggtggtatcatcggtcctgcagcttggaaatatcgtcttcaagaaggaaagaaacacagaccaggcgtccatgccagataacacagctgctcagaaagtttgccacctcatgggaattaatgtgacagatttcaccagatccatcctcactcctcgtatcaaggttgggcgagatgtggtacagaaagctcagacaaaagaacaggctgactttgctgtagaggctttggccaaggcaacatatgagcgccttttccgctggatactcacccgcgtgaacaaagccctggacaagacccatcggcaaggggcttccttcctggggatcctggatatagctggatttgagatctttgaggtgaactccttcgagcagctgtgcatcaactacaccaacgagaagctgcagcagctcttcaaccacaccatgttcatcctggagcaggaggagtaccagcgcgagggcatcgagtggaacttcatcgactttgggctggacctacagccctgcatcgagctcatcgagcgaccgaacaaccctccaggtgtgctggccctgctggacgaggaatgctggttccccaaagccacggacaagtctttcgtggagaagctgtgcacggagcagggcagccaccccaagttccagaagcccaagcagctcaaggacaagactgagttctccatcatccattatgctgggaaggtggactataatgcgagtgcctggctgaccaagaatatggacccgctgaatgacaacgtgacttccctgctcaatgcctcctccgacaagtttgtggccgacctgtggaaggacgtggaccgcatcgtgggcctggaccagatggccaagatgacggagagctcgctgcccagcgcctccaagaccaagaagggcatgttccgcacagtggggcagctgtacaaggagcagctgggcaagctgatgaccacgctacgcaacaccacgcccaacttcgtgcgctgcatcatccccaaccacgagaagaggtccggcaagctggatgcgttcctggtgctggagcagctgcggtgcaatggggtgctggaaggcattcgcatctgccggcagggcttccccaaccggatcgtcttccaggagttccgccaacgctacgagatcctggcggcgaatgccatccccaaaggcttcatggacgggaagcaggcctgcattctcatgatcaaagccctggaacttgaccccaacttatacaggatagggcagagcaaaatcttcttccgaactggcgtcctggcccacctagaggaggagcgagatttgaagatcaccgatgtcatcatggccttccaggcgatgtgtcgtggctacttggccagaaaggcttttgccaagaggcagcagcagctgaccgccatgaaggtgattcagaggaactgcgccgcctacctcaagctgcggaactggcagtggtggaggcttttcaccaaagtgaagccactgctgcaggtgacacggcaggaggaggagatgcaggccaaggaggatgaactgcagaagaccaaggagcggcagcagaaggcagagaatgagcttaaggagctggaacagaagcactcgcagctgaccgaggagaagaacctgctacaggaacagctgcaggcagagacagagctgtatgcagaggctgaggagatgcgggtgcggctggcggccaagaagcaggagctggaggagatactgcatgagatggaggcccgcctggaggaggaggaagacaggggccagcagctacaggctgaaaggaagaagatggcccagcagatgctggaccttgaagaacagctggaggaggaggaagctgccaggcagaagctgcaacttgagaaggtcacggctgaggccaagatcaagaaactggaggatgagatcctggtcatggatgatcagaacaataaactatcaaaagaacgaaaactccttgaggagaggattagtgacttaacgacaaatcttgcagaagaggaagaaaaggccaagaatcttaccaagctgaaaaacaagcatgaatctatgatttcagaactggaagtgcggctaaagaaggaagagaagagccgacaggagctggagaagctgaaacggaagctggagggtgatgccagcgacttccacgagcagatcgctgacctccaggcgcagatcgcagagctcaagatgcagctggccaagaaggaggaggagctgcaggcggccctggccaggcttgacgatgaaatcgctcagaagaacaatgccctgaagaagatccgggagctggagggccacatctcagacctccaggaggacctggactcagagcgggccgccaggaacaaggctgaaaagcagaagcgagacctcggcgaggagctggaggccctaaagacagagctggaagacacactggacagcacagccactcagcaggagctcagggccaagagggagcaggaggtgacggtgctgaagaaggccctggatgaagagacgcggtcccatgaggctcaggtccaggagatgaggcagaaacacgcacaggcggtggaggagctcacagagcagcttgagcagttcaagagggccaaggcgaacctagacaagaataagcagacgctggagaaagagaacgcagacctggccggggagctgcgggtcctgggccaggccaagcaggaggtggaacataagaagaagaagctggaggcgcaggtgcaggagctgcagtccaagtgcagcgatggggagcgggcccgggcggagctcaatgacaaagtccacaagctgcagaatgaagttgagagcgtcacagggatgcttaacgaggccgaggggaaggccattaagctggccaaggacgtggcgtccctcagttcccagctccaggacacccaggagctgcttcaagaagaaacccggcagaagctcaacgtgtctacgaagctgcgccagctggaggaggagcggaacagcctgcaagaccagctggacgaggagatggaggccaagcagaacctggagcgccacatctccactctcaacatccagctctccgactcgaagaagaagctgcaggactttgccagcaccgtggaagctctggaagaggggaagaagaggttccagaaggagatcgagaacctcacccagcagtacgaggagaaggcggccgcttatgataaactggaaaagaccaagaacaggcttcagcaggagctggacgacctggttgttgatttggacaaccagcggcaactcgtgtccaacctggaaaagaagcagaggaaatttgatcagttgttagccgaggagaaaaacatctcttccaaatacgcggatgagagggacagagctgaggcagaagccagggagaaggaaaccaaggccctgtccctggctcgggcccttgaagaggccttggaagccaaagaggaactcgagcggaccaacaaaatgctcaaagccgaaatggaagacctggtcagctccaaggatgacgtgggcaagaacgtccatgagctggagaagtccaagcgggccctggagacccagatggaggagatgaagacgcagctggaagagctggaggacgagctgcaagccacggaggacgccaaactgcggctggaagtcaacatgcaggcgctcaagggccagttcgaaagggatctccaagcccgggacgagcagaatgaggagaagaggaggcaactgcagagacagcttcacgagtatgagacggaactggaagacgagcgaaagcaacgtgccctggcagctgcagcaaagaagaagctggaaggggacctgaaagacctggagcttcaggccgactctgccatcaaggggagggaggaagccatcaagcagctacgcaaactgcaggctcagatgaaggactttcaaagagagctggaagatgcccgtgcctccagagatgagatctttgccacagccaaagagaatgagaagaaagccaagagcttggaagcagacctcatgcagctacaagaggacctcgccgccgctgagagggctcgcaaacaagcggacctcgagaaggaggaactggcagaggagctggccagtagcctgtcgggaaggaacgcactccaggacgagaagcgccgcctggaggcccggatcgcccagctggaggaggagctggaggaggagcagggcaacatggaggccatgagcgaccgggtccgcaaagccacacagcaggccgagcagctcagcaacgagctggccacagagcgcagcacggcccagaagaatgagagtgcccggcagcagctcgagcggcagaacaaggagctccggagcaagctccacgagatggagggggccgtcaagtccaagttcaagtccaccatcgcggcgctggaggccaagattgcacagctggaggagcaggtcgagcaggaggccagagagaaacaggcggccaccaagtcgctgaagcagaaagacaagaagctgaaggaaatcttgctgcaggtggaggacgagcgcaagatggccgagcagtacaaggagcaggcagagaaaggcaatgccagggtcaagcagctcaagaggcagctggaggaggcagaggaggagtcccagcgcatcaacgccaaccgcaggaagctgcagcgggagctggatgaggccacggagagcaacgaggccatgggccgcgaggtgaacgcactcaagagcaagctcaggcgaggaaacgagacctctttcgttccttctagaaggtctggaggacgtagagttattgaaaatgcagatggttctgaggaggaaacggacactcgagacgcagacttcaatggaaccaaggccagtgaataagcaactttctacagttttgcaccacggcaagaaaaccaaaaaccaaaacaaacaaacaaaaaaaacccaacaacaacccagaacaaagcaaaacccagcagactgtacttagcattgtctaaatccattctcaaattccaaatatcacagacacccctcacacaaggaatataaaaaccaccaccctccagcctgggcaacgtagtaaaacctcatctatacaagaatttaaaaataagctgggcgtggtggtacacacctgtggtcccagctactagggaggctgagccaggaagaacgctccagcccaggacttcgaggctgcaatgagctataattgcatcattgcactccagcctgggcaacagagaccctgtctcaaccaccaccaccaccaccacccctactacccctgtattcaaggtaaaaattgaagtttgtatgatgtaagagatgagaaaaacccaacaggaaacacagacacatcctccagttctatcaatggattgtgcagacactgagtttttagaaaaacatatccacggtaaccggtccctggcaattctgtttacatgaaatggggagaaagtcaccgaaatgggtgccgccggcccccactcccaattcattccctaacctgcaaacctttccaacttctcacgtcaggcctttgagaattctttccccctctcctggtttccacacctcagacacgcacagttcaccaagtgccttctgtagtcacatgaattgaaaaggagacgctgctcccacggaggggagcaggaatgctgcactgtttacaccctgactgtgcttaaaaacactttcactaataaatggttataaatcacaa

SEQ ID NO: 76 - protein, 1979 aa, Homo sapiens
  MISC_FEATURE (1)..(1979): myosin, heavy chain 11, smooth muscle (MYH11),transcript variant SM1B
MAQKGQLSDDEKFLFVDKNFINSPVAQADWAAKRLVWVPSEKQGFEAASIKEEKGDEVVVELVENGKKVTVGKDDIQKMNPPKFSKVEDMAELTCLNEASVLHNLRERYFSGLIYTYSGLFCVVVNPYKHLPIYSEKIVDMYKGKKRHEMPPHIYAIADTAYRSMLQDREDQSILCTGESGAGKTENTKKVIQYLAVVASSHKGKKDTSITQGPSFAYGELEKQLLQANPILEAFGNAKTVKNDNSSRFGKFIRINFDVTGYIVGANIETYLLEKSRAIRQARDERTFHIFYYMIAGAKEKMRSDLLLEGFNNYTFLSNGFVPIPAAQDDEMFQETVEAMAIMGFSEEEQLSILKVVSSVLQLGNIVFKKERNTDQASMPDNTAAQKVCHLMGINVTDFTRSILTPRIKVGRDVVQKAQTKEQADFAVEALAKATYERLFRWILTRVNKALDKTHRQGASFLGILDIAGFEIFEVNSFEQLCINYTNEKLQQLFNHTMFILEQEEYQREGIEWNFIDFGLDLQPCIELIERPNNPPGVLALLDEECWFPKATDKSFVEKLCTEQGSHPKFQKPKQLKDKTEFSIIHYAGKVDYNASAWLTKNMDPLNDNVTSLLNASSDKFVADLWKDVDRIVGLDQMAKMTESSLPSASKTKKGMFRTVGQLYKEQLGKLMTTLRNTTPNFVRCIIPNHEKRSGKLDAFLVLEQLRCNGVLEGIRICRQGFPNRIVFQEFRQRYEILAANAIPKGFMDGKQACILMIKALELDPNLYRIGQSKIFFRTGVLAHLEEERDLKITDVIMAFQAMCRGYLARKAFAKRQQQLTAMKVIQRNCAAYLKLRNWQWWRLFTKVKPLLQVTRQEEEMQAKEDELQKTKERQQKAENELKELEQKHSQLTEEKNLLQEQLQAETELYAEAEEMRVRLAAKKQELEEILHEMEARLEEEEDRGQQLQAERKKMAQQMLDLEEQLEEEEAARQKLQLEKVTAEAKIKKLEDEILVMDDQNNKLSKERKLLEERISDLTTNLAEEEEKAKNLTKLKNKHESMISELEVRLKKEEKSRQELEKLKRKLEGDASDFHEQIADLQAQIAELKMQLAKKEEELQAALARLDDEIAQKNNALKKIRELEGHISDLQEDLDSERAARNKAEKQKRDLGEELEALKTELEDTLDSTATQQELRAKREQEVTVLKKALDEETRSHEAQVQEMRQKHAQAVEELTEQLEQFKRAKANLDKNKQTLEKENADLAGELRVLGQAKQEVEHKKKKLEAQVQELQSKCSDGERARAELNDKVHKLQNEVESVTGMLNEAEGKAIKLAKDVASLSSQLQDTQELLQEETRQKLNVSTKLRQLEEERNSLQDQLDEEMEAKQNLERHISTLNIQLSDSKKKLQDFASTVEALEEGKKRFQKEIENLTQQYEEKAAAYDKLEKTKNRLQQELDDLVVDLDNQRQLVSNLEKKQRKFDQLLAEEKNISSKYADERDRAEAEAREKETKALSLARALEEALEAKEELERTNKMLKAEMEDLVSSKDDVGKNVHELEKSKRALETQMEEMKTQLEELEDELQATEDAKLRLEVNMQALKGQFERDLQARDEQNEEKRRQLQRQLHEYETELEDERKQRALAAAAKKKLEGDLKDLELQADSAIKGREEAIKQLRKLQAQMKDFQRELEDARASRDEIFATAKENEKKAKSLEADLMQLQEDLAAAERARKQADLEKEELAEELASSLSGRNALQDEKRRLEARIAQLEEELEEEQGNMEAMSDRVRKATQQAEQLSNELATERSTAQKNESARQQLERQNKELRSKLHEMEGAVKSKFKSTIAALEAKIAQLEEQVEQEAREKQAATKSLKQKDKKLKEILLQVEDERKMAEQYKEQAEKGNARVKQLKRQLEEAEEESQRINANRRKLQRELDEATESNEAMGREVNALKSKLRRGNETSFVPSRRSGGRRVIENADGSEEETDTRDADFNGTKASE

SEQ ID NO: 77 - DNA, 6921 bp, Homo sapiens
  misc_feature (1)..(6921): myosin, heavy chain 11, smooth muscle (MYH11),transcript variant SM2A
gggagatttggacgctccggcctgggaggtgcgtcagatccgagctcgccatccagtttcctctccactagtccccccagttggagatctgggaccaacaaggcaccatggcgcagaagggccaactcagtgacgatgagaagttcctctttgtggacaaaaacttcatcaacagcccagtggcccaggctgactgggccgccaagagactcgtctgggtcccctcggagaagcagggcttcgaggcagccagcattaaggaggagaagggggatgaggtggttgtggagctggtggagaatggcaagaaggtcacggttgggaaagatgacatccagaagatgaacccacccaagttctccaaggtggaggacatggcggagctgacgtgcctcaacgaagcctccgtgctacacaacctgagggagcggtacttctcagggctaatatatacgtactctggcctcttctgcgtggtggtcaacccctataaacacctgcccatctactcggagaagatcgtcgacatgtacaagggcaagaagaggcacgagatgccgcctcacatctacgccatcgcagacacggcctaccggagcatgcttcaagatcgggaggaccagtccattctatgcacaggcgagtctggagccgggaaaaccgaaaacaccaagaaggtcattcagtacctggccgtggtggcctcctcccacaagggcaagaaagacacaagtatcacgggagagctggaaaagcagcttctacaagcaaacccgattctggaggctttcggcaacgccaaaacagtgaagaacgacaactcctcacgattcggcaaattcatccgcatcaacttcgacgtcacgggttacatcgtgggagccaacattgagacctatctgctagaaaaatcacgggcaattcgccaagccagagacgagaggacattccacatcttttactacatgattgctggagccaaggagaagatgagaagtgacttgcttttggagggcttcaacaactacaccttcctctccaatggctttgtgcccatcccagcagcccaggatgatgagatgttccaggaaaccgtggaggccatggcaatcatgggtttcagcgaggaggagcagctatccatattgaaggtggtatcatcggtcctgcagcttggaaatatcgtcttcaagaaggaaagaaacacagaccaggcgtccatgccagataacacagctgctcagaaagtttgccacctcatgggaattaatgtgacagatttcaccagatccatcctcactcctcgtatcaaggttgggcgagatgtggtacagaaagctcagacaaaagaacaggctgactttgctgtagaggctttggccaaggcaacatatgagcgccttttccgctggatactcacccgcgtgaacaaagccctggacaagacccatcggcaaggggcttccttcctggggatcctggatatagctggatttgagatctttgaggtgaactccttcgagcagctgtgcatcaactacaccaacgagaagctgcagcagctcttcaaccacaccatgttcatcctggagcaggaggagtaccagcgcgagggcatcgagtggaacttcatcgactttgggctggacctacagccctgcatcgagctcatcgagcgaccgaacaaccctccaggtgtgctggccctgctggacgaggaatgctggttccccaaagccacggacaagtctttcgtggagaagctgtgcacggagcagggcagccaccccaagttccagaagcccaagcagctcaaggacaagactgagttctccatcatccattatgctgggaaggtggactataatgcgagtgcctggctgaccaagaatatggacccgctgaatgacaacgtgacttccctgctcaatgcctcctccgacaagtttgtggccgacctgtggaaggacgtggaccgcatcgtgggcctggaccagatggccaagatgacggagagctcgctgcccagcgcctccaagaccaagaagggcatgttccgcacagtggggcagctgtacaaggagcagctgggcaagctgatgaccacgctacgcaacaccacgcccaacttcgtgcgctgcatcatccccaaccacgagaagaggtccggcaagctggatgcgttcctggtgctggagcagctgcggtgcaatggggtgctggaaggcattcgcatctgccggcagggcttccccaaccggatcgtcttccaggagttccgccaacgctacgagatcctggcggcgaatgccatccccaaaggcttcatggacgggaagcaggcctgcattctcatgatcaaagccctggaacttgaccccaacttatacaggatagggcagagcaaaatcttcttccgaactggcgtcctggcccacctagaggaggagcgagatttgaagatcaccgatgtcatcatggccttccaggcgatgtgtcgtggctacttggccagaaaggcttttgccaagaggcagcagcagctgaccgccatgaaggtgattcagaggaactgcgccgcctacctcaagctgcggaactggcagtggtggaggcttttcaccaaagtgaagccactgctgcaggtgacacggcaggaggaggagatgcaggccaaggaggatgaactgcagaagaccaaggagcggcagcagaaggcagagaatgagcttaaggagctggaacagaagcactcgcagctgaccgaggagaagaacctgctacaggaacagctgcaggcagagacagagctgtatgcagaggctgaggagatgcgggtgcggctggcggccaagaagcaggagctggaggagatactgcatgagatggaggcccgcctggaggaggaggaagacaggggccagcagctacaggctgaaaggaagaagatggcccagcagatgctggaccttgaagaacagctggaggaggaggaagctgccaggcagaagctgcaacttgagaaggtcacggctgaggccaagatcaagaaactggaggatgagatcctggtcatggatgatcagaacaataaactatcaaaagaacgaaaactccttgaggagaggattagtgacttaacgacaaatcttgcagaagaggaagaaaaggccaagaatcttaccaagctgaaaaacaagcatgaatctatgatttcagaactggaagtgcggctaaagaaggaagagaagagccgacaggagctggagaagctgaaacggaagctggagggtgatgccagcgacttccacgagcagatcgctgacctccaggcgcagatcgcagagctcaagatgcagctggccaagaaggaggaggagctgcaggcggccctggccaggcttgacgatgaaatcgctcagaagaacaatgccctgaagaagatccgggagctggagggccacatctcagacctccaggaggacctggactcagagcgggccgccaggaacaaggctgaaaagcagaagcgagacctcggcgaggagctggaggccctaaagacagagctggaagacacactggacagcacagccactcagcaggagctcagggccaagagggagcaggaggtgacggtgctgaagaaggccctggatgaagagacgcggtcccatgaggctcaggtccaggagatgaggcagaaacacgcacaggcggtggaggagctcacagagcagcttgagcagttcaagagggccaaggcgaacctagacaagaataagcagacgctggagaaagagaacgcagacctggccggggagctgcgggtcctgggccaggccaagcaggaggtggaacataagaagaagaagctggaggcgcaggtgcaggagctgcagtccaagtgcagcgatggggagcgggcccgggcggagctcaatgacaaagtccacaagctgcagaatgaagttgagagcgtcacagggatgcttaacgaggccgaggggaaggccattaagctggccaaggacgtggcgtccctcagttcccagctccaggacacccaggagctgcttcaagaagaaacccggcagaagctcaacgtgtctacgaagctgcgccagctggaggaggagcggaacagcctgcaagaccagctggacgaggagatggaggccaagcagaacctggagcgccacatctccactctcaacatccagctctccgactcgaagaagaagctgcaggactttgccagcaccgtggaagctctggaagaggggaagaagaggttccagaaggagatcgagaacctcacccagcagtacgaggagaaggcggccgcttatgataaactggaaaagaccaagaacaggcttcagcaggagctggacgacctggttgttgatttggacaaccagcggcaactcgtgtccaacctggaaaagaagcagaggaaatttgatcagttgttagccgaggagaaaaacatctcttccaaatacgcggatgagagggacagagctgaggcagaagccagggagaaggaaaccaaggccctgtccctggctcgggcccttgaagaggccttggaagccaaagaggaactcgagcggaccaacaaaatgctcaaagccgaaatggaagacctggtcagctccaaggatgacgtgggcaagaacgtccatgagctggagaagtccaagcgggccctggagacccagatggaggagatgaagacgcagctggaagagctggaggacgagctgcaagccacggaggacgccaaactgcggctggaagtcaacatgcaggcgctcaagggccagttcgaaagggatctccaagcccgggacgagcagaatgaggagaagaggaggcaactgcagagacagcttcacgagtatgagacggaactggaagacgagcgaaagcaacgtgccctggcagctgcagcaaagaagaagctggaaggggacctgaaagacctggagcttcaggccgactctgccatcaaggggagggaggaagccatcaagcagctacgcaaactgcaggctcagatgaaggactttcaaagagagctggaagatgcccgtgcctccagagatgagatctttgccacagccaaagagaatgagaagaaagccaagagcttggaagcagacctcatgcagctacaagaggacctcgccgccgctgagagggctcgcaaacaagcggacctcgagaaggaggaactggcagaggagctggccagtagcctgtcgggaaggaacgcactccaggacgagaagcgccgcctggaggcccggatcgcccagctggaggaggagctggaggaggagcagggcaacatggaggccatgagcgaccgggtccgcaaagccacacagcaggccgagcagctcagcaacgagctggccacagagcgcagcacggcccagaagaatgagagtgcccggcagcagctcgagcggcagaacaaggagctccggagcaagctccacgagatggagggggccgtcaagtccaagttcaagtccaccatcgcggcgctggaggccaagattgcacagctggaggagcaggtcgagcaggaggccagagagaaacaggcggccaccaagtcgctgaagcagaaagacaagaagctgaaggaaatcttgctgcaggtggaggacgagcgcaagatggccgagcagtacaaggagcaggcagagaaaggcaatgccagggtcaagcagctcaagaggcagctggaggaggcagaggaggagtcccagcgcatcaacgccaaccgcaggaagctgcagcgggagctggatgaggccacggagagcaacgaggccatgggccgcgaggtgaacgcactcaagagcaagctcagagggccccccccacaggaaacttcgcagtgatgcaccaggcgaggaaacgagacctctttcgttccttctagaaggtctggaggacgtagagttattgaaaatgcagatggttctgaggaggaaacggacactcgagacgcagacttcaatggaaccaaggccagtgaataagcaactttctacagttttgcaccacggcaagaaaaccaaaaaccaaaacaaacaaacaaaaaaaacccaacaacaacccagaacaaagcaaaacccagcagactgtacttagcattgtctaaatccattctcaaattccaaatatcacagacacccctcacacaaggaatataaaaaccaccaccctccagcctgggcaacgtagtaaaacctcatctatacaagaatttaaaaataagctgggcgtggtggtacacacctgtggtcccagctactagggaggctgagccaggaagaacgctccagcccaggacttcgaggctgcaatgagctataattgcatcattgcactccagcctgggcaacagagaccctgtctcaaccaccaccaccaccaccacccctactacccctgtattcaaggtaaaaattgaagtttgtatgatgtaagagatgagaaaaacccaacaggaaacacagacacatcctccagttctatcaatggattgtgcagacactgagtttttagaaaaacatatccacggtaaccggtccctggcaattctgtttacatgaaatggggagaaagtcaccgaaatgggtgccgccggcccccactcccaattcattccctaacctgcaaacctttccaacttctcacgtcaggcctttgagaattctttccccctctcctggtttccacacctcagacacgcacagttcaccaagtgccttctgtagtcacatgaattgaaaaggagacgctgctcccacggaggggagcaggaatgctgcactgtttacaccctgactgtgcttaaaaacactttcactaataaatggttataaatcacaa

SEQ ID NO: 78 - protein, 1938 aa, Homo sapiens
  MISC_FEATURE (1)..(1938): myosin, heavy chain 11, smooth muscle (MYH11),transcript variant SM2A
MAQKGQLSDDEKFLFVDKNFINSPVAQADWAAKRLVWVPSEKQGFEAASIKEEKGDEVVVELVENGKKVTVGKDDIQKMNPPKFSKVEDMAELTCLNEASVLHNLRERYFSGLIYTYSGLFCVVVNPYKHLPIYSEKIVDMYKGKKRHEMPPHIYAIADTAYRSMLQDREDQSILCTGESGAGKTENTKKVIQYLAVVASSHKGKKDTSITGELEKQLLQANPILEAFGNAKTVKNDNSSRFGKFIRINFDVTGYIVGANIETYLLEKSRAIRQARDERTFHIFYYMIAGAKEKMRSDLLLEGFNNYTFLSNGFVPIPAAQDDEMFQETVEAMAIMGFSEEEQLSILKVVSSVLQLGNIVFKKERNTDQASMPDNTAAQKVCHLMGINVTDFTRSILTPRIKVGRDVVQKAQTKEQADFAVEALAKATYERLFRWILTRVNKALDKTHRQGASFLGILDIAGFEIFEVNSFEQLCINYTNEKLQQLFNHTMFILEQEEYQREGIEWNFIDFGLDLQPCIELIERPNNPPGVLALLDEECWFPKATDKSFVEKLCTEQGSHPKFQKPKQLKDKTEFSIIHYAGKVDYNASAWLTKNMDPLNDNVTSLLNASSDKFVADLWKDVDRIVGLDQMAKMTESSLPSASKTKKGMFRTVGQLYKEQLGKLMTTLRNTTPNFVRCIIPNHEKRSGKLDAFLVLEQLRCNGVLEGIRICRQGFPNRIVFQEFRQRYEILAANAIPKGFMDGKQACILMIKALELDPNLYRIGQSKIFFRTGVLAHLEEERDLKITDVIMAFQAMCRGYLARKAFAKRQQQLTAMKVIQRNCAAYLKLRNWQWWRLFTKVKPLLQVTRQEEEMQAKEDELQKTKERQQKAENELKELEQKHSQLTEEKNLLQEQLQAETELYAEAEEMRVRLAAKKQELEEILHEMEARLEEEEDRGQQLQAERKKMAQQMLDLEEQLEEEEAARQKLQLEKVTAEAKIKKLEDEILVMDDQNNKLSKERKLLEERISDLTTNLAEEEEKAKNLTKLKNKHESMISELEVRLKKEEKSRQELEKLKRKLEGDASDFHEQIADLQAQIAELKMQLAKKEEELQAALARLDDEIAQKNNALKKIRELEGHISDLQEDLDSERAARNKAEKQKRDLGEELEALKTELEDTLDSTATQQELRAKREQEVTVLKKALDEETRSHEAQVQEMRQKHAQAVEELTEQLEQFKRAKANLDKNKQTLEKENADLAGELRVLGQAKQEVEHKKKKLEAQVQELQSKCSDGERARAELNDKVHKLQNEVESVTGMLNEAEGKAIKLAKDVASLSSQLQDTQELLQEETRQKLNVSTKLRQLEEERNSLQDQLDEEMEAKQNLERHISTLNIQLSDSKKKLQDFASTVEALEEGKKRFQKEIENLTQQYEEKAAAYDKLEKTKNRLQQELDDLVVDLDNQRQLVSNLEKKQRKFDQLLAEEKNISSKYADERDRAEAEAREKETKALSLARALEEALEAKEELERTNKMLKAEMEDLVSSKDDVGKNVHELEKSKRALETQMEEMKTQLEELEDELQATEDAKLRLEVNMQALKGQFERDLQARDEQNEEKRRQLQRQLHEYETELEDERKQRALAAAAKKKLEGDLKDLELQADSAIKGREEAIKQLRKLQAQMKDFQRELEDARASRDEIFATAKENEKKAKSLEADLMQLQEDLAAAERARKQADLEKEELAEELASSLSGRNALQDEKRRLEARIAQLEEELEEEQGNMEAMSDRVRKATQQAEQLSNELATERSTAQKNESARQQLERQNKELRSKLHEMEGAVKSKFKSTIAALEAKIAQLEEQVEQEAREKQAATKSLKQKDKKLKEILLQVEDERKMAEQYKEQAEKGNARVKQLKRQLEEAEEESQRINANRRKLQRELDEATESNEAMGREVNALKSKLRGPPPQETSQ

SEQ ID NO: 79 - DNA, 6942 bp, Homo sapiens
  misc_feature (1)..(6942): myosin, heavy chain 11, smooth muscle (MYH11),transcript variant SM2B
gggagatttggacgctccggcctgggaggtgcgtcagatccgagctcgccatccagtttcctctccactagtccccccagttggagatctgggaccaacaaggcaccatggcgcagaagggccaactcagtgacgatgagaagttcctctttgtggacaaaaacttcatcaacagcccagtggcccaggctgactgggccgccaagagactcgtctgggtcccctcggagaagcagggcttcgaggcagccagcattaaggaggagaagggggatgaggtggttgtggagctggtggagaatggcaagaaggtcacggttgggaaagatgacatccagaagatgaacccacccaagttctccaaggtggaggacatggcggagctgacgtgcctcaacgaagcctccgtgctacacaacctgagggagcggtacttctcagggctaatatatacgtactctggcctcttctgcgtggtggtcaacccctataaacacctgcccatctactcggagaagatcgtcgacatgtacaagggcaagaagaggcacgagatgccgcctcacatctacgccatcgcagacacggcctaccggagcatgcttcaagatcgggaggaccagtccattctatgcacaggcgagtctggagccgggaaaaccgaaaacaccaagaaggtcattcagtacctggccgtggtggcctcctcccacaagggcaagaaagacacaagtatcacgcaaggcccatcttttgcctacggagagctggaaaagcagcttctacaagcaaacccgattctggaggctttcggcaacgccaaaacagtgaagaacgacaactcctcacgattcggcaaattcatccgcatcaacttcgacgtcacgggttacatcgtgggagccaacattgagacctatctgctagaaaaatcacgggcaattcgccaagccagagacgagaggacattccacatcttttactacatgattgctggagccaaggagaagatgagaagtgacttgcttttggagggcttcaacaactacaccttcctctccaatggctttgtgcccatcccagcagcccaggatgatgagatgttccaggaaaccgtggaggccatggcaatcatgggtttcagcgaggaggagcagctatccatattgaaggtggtatcatcggtcctgcagcttggaaatatcgtcttcaagaaggaaagaaacacagaccaggcgtccatgccagataacacagctgctcagaaagtttgccacctcatgggaattaatgtgacagatttcaccagatccatcctcactcctcgtatcaaggttgggcgagatgtggtacagaaagctcagacaaaagaacaggctgactttgctgtagaggctttggccaaggcaacatatgagcgccttttccgctggatactcacccgcgtgaacaaagccctggacaagacccatcggcaaggggcttccttcctggggatcctggatatagctggatttgagatctttgaggtgaactccttcgagcagctgtgcatcaactacaccaacgagaagctgcagcagctcttcaaccacaccatgttcatcctggagcaggaggagtaccagcgcgagggcatcgagtggaacttcatcgactttgggctggacctacagccctgcatcgagctcatcgagcgaccgaacaaccctccaggtgtgctggccctgctggacgaggaatgctggttccccaaagccacggacaagtctttcgtggagaagctgtgcacggagcagggcagccaccccaagttccagaagcccaagcagctcaaggacaagactgagttctccatcatccattatgctgggaaggtggactataatgcgagtgcctggctgaccaagaatatggacccgctgaatgacaacgtgacttccctgctcaatgcctcctccgacaagtttgtggccgacctgtggaaggacgtggaccgcatcgtgggcctggaccagatggccaagatgacggagagctcgctgcccagcgcctccaagaccaagaagggcatgttccgcacagtggggcagctgtacaaggagcagctgggcaagctgatgaccacgctacgcaacaccacgcccaacttcgtgcgctgcatcatccccaaccacgagaagaggtccggcaagctggatgcgttcctggtgctggagcagctgcggtgcaatggggtgctggaaggcattcgcatctgccggcagggcttccccaaccggatcgtcttccaggagttccgccaacgctacgagatcctggcggcgaatgccatccccaaaggcttcatggacgggaagcaggcctgcattctcatgatcaaagccctggaacttgaccccaacttatacaggatagggcagagcaaaatcttcttccgaactggcgtcctggcccacctagaggaggagcgagatttgaagatcaccgatgtcatcatggccttccaggcgatgtgtcgtggctacttggccagaaaggcttttgccaagaggcagcagcagctgaccgccatgaaggtgattcagaggaactgcgccgcctacctcaagctgcggaactggcagtggtggaggcttttcaccaaagtgaagccactgctgcaggtgacacggcaggaggaggagatgcaggccaaggaggatgaactgcagaagaccaaggagcggcagcagaaggcagagaatgagcttaaggagctggaacagaagcactcgcagctgaccgaggagaagaacctgctacaggaacagctgcaggcagagacagagctgtatgcagaggctgaggagatgcgggtgcggctggcggccaagaagcaggagctggaggagatactgcatgagatggaggcccgcctggaggaggaggaagacaggggccagcagctacaggctgaaaggaagaagatggcccagcagatgctggaccttgaagaacagctggaggaggaggaagctgccaggcagaagctgcaacttgagaaggtcacggctgaggccaagatcaagaaactggaggatgagatcctggtcatggatgatcagaacaataaactatcaaaagaacgaaaactccttgaggagaggattagtgacttaacgacaaatcttgcagaagaggaagaaaaggccaagaatcttaccaagctgaaaaacaagcatgaatctatgatttcagaactggaagtgcggctaaagaaggaagagaagagccgacaggagctggagaagctgaaacggaagctggagggtgatgccagcgacttccacgagcagatcgctgacctccaggcgcagatcgcagagctcaagatgcagctggccaagaaggaggaggagctgcaggcggccctggccaggcttgacgatgaaatcgctcagaagaacaatgccctgaagaagatccgggagctggagggccacatctcagacctccaggaggacctggactcagagcgggccgccaggaacaaggctgaaaagcagaagcgagacctcggcgaggagctggaggccctaaagacagagctggaagacacactggacagcacagccactcagcaggagctcagggccaagagggagcaggaggtgacggtgctgaagaaggccctggatgaagagacgcggtcccatgaggctcaggtccaggagatgaggcagaaacacgcacaggcggtggaggagctcacagagcagcttgagcagttcaagagggccaaggcgaacctagacaagaataagcagacgctggagaaagagaacgcagacctggccggggagctgcgggtcctgggccaggccaagcaggaggtggaacataagaagaagaagctggaggcgcaggtgcaggagctgcagtccaagtgcagcgatggggagcgggcccgggcggagctcaatgacaaagtccacaagctgcagaatgaagttgagagcgtcacagggatgcttaacgaggccgaggggaaggccattaagctggccaaggacgtggcgtccctcagttcccagctccaggacacccaggagctgcttcaagaagaaacccggcagaagctcaacgtgtctacgaagctgcgccagctggaggaggagcggaacagcctgcaagaccagctggacgaggagatggaggccaagcagaacctggagcgccacatctccactctcaacatccagctctccgactcgaagaagaagctgcaggactttgccagcaccgtggaagctctggaagaggggaagaagaggttccagaaggagatcgagaacctcacccagcagtacgaggagaaggcggccgcttatgataaactggaaaagaccaagaacaggcttcagcaggagctggacgacctggttgttgatttggacaaccagcggcaactcgtgtccaacctggaaaagaagcagaggaaatttgatcagttgttagccgaggagaaaaacatctcttccaaatacgcggatgagagggacagagctgaggcagaagccagggagaaggaaaccaaggccctgtccctggctcgggcccttgaagaggccttggaagccaaagaggaactcgagcggaccaacaaaatgctcaaagccgaaatggaagacctggtcagctccaaggatgacgtgggcaagaacgtccatgagctggagaagtccaagcgggccctggagacccagatggaggagatgaagacgcagctggaagagctggaggacgagctgcaagccacggaggacgccaaactgcggctggaagtcaacatgcaggcgctcaagggccagttcgaaagggatctccaagcccgggacgagcagaatgaggagaagaggaggcaactgcagagacagcttcacgagtatgagacggaactggaagacgagcgaaagcaacgtgccctggcagctgcagcaaagaagaagctggaaggggacctgaaagacctggagcttcaggccgactctgccatcaaggggagggaggaagccatcaagcagctacgcaaactgcaggctcagatgaaggactttcaaagagagctggaagatgcccgtgcctccagagatgagatctttgccacagccaaagagaatgagaagaaagccaagagcttggaagcagacctcatgcagctacaagaggacctcgccgccgctgagagggctcgcaaacaagcggacctcgagaaggaggaactggcagaggagctggccagtagcctgtcgggaaggaacgcactccaggacgagaagcgccgcctggaggcccggatcgcccagctggaggaggagctggaggaggagcagggcaacatggaggccatgagcgaccgggtccgcaaagccacacagcaggccgagcagctcagcaacgagctggccacagagcgcagcacggcccagaagaatgagagtgcccggcagcagctcgagcggcagaacaaggagctccggagcaagctccacgagatggagggggccgtcaagtccaagttcaagtccaccatcgcggcgctggaggccaagattgcacagctggaggagcaggtcgagcaggaggccagagagaaacaggcggccaccaagtcgctgaagcagaaagacaagaagctgaaggaaatcttgctgcaggtggaggacgagcgcaagatggccgagcagtacaaggagcaggcagagaaaggcaatgccagggtcaagcagctcaagaggcagctggaggaggcagaggaggagtcccagcgcatcaacgccaaccgcaggaagctgcagcgggagctggatgaggccacggagagcaacgaggccatgggccgcgaggtgaacgcactcaagagcaagctcagagggccccccccacaggaaacttcgcagtgatgcaccaggcgaggaaacgagacctctttcgttccttctagaaggtctggaggacgtagagttattgaaaatgcagatggttctgaggaggaaacggacactcgagacgcagacttcaatggaaccaaggccagtgaataagcaactttctacagttttgcaccacggcaagaaaaccaaaaaccaaaacaaacaaacaaaaaaaacccaacaacaacccagaacaaagcaaaacccagcagactgtacttagcattgtctaaatccattctcaaattccaaatatcacagacacccctcacacaaggaatataaaaaccaccaccctccagcctgggcaacgtagtaaaacctcatctatacaagaatttaaaaataagctgggcgtggtggtacacacctgtggtcccagctactagggaggctgagccaggaagaacgctccagcccaggacttcgaggctgcaatgagctataattgcatcattgcactccagcctgggcaacagagaccctgtctcaaccaccaccaccaccaccacccctactacccctgtattcaaggtaaaaattgaagtttgtatgatgtaagagatgagaaaaacccaacaggaaacacagacacatcctccagttctatcaatggattgtgcagacactgagtttttagaaaaacatatccacggtaaccggtccctggcaattctgtttacatgaaatggggagaaagtcaccgaaatgggtgccgccggcccccactcccaattcattccctaacctgcaaacctttccaacttctcacgtcaggcctttgagaattctttccccctctcctggtttccacacctcagacacgcacagttcaccaagtgccttctgtagtcacatgaattgaaaaggagacgctgctcccacggaggggagcaggaatgctgcactgtttacaccctgactgtgcttaaaaacactttcactaataaatggttataaatcacaa

SEQ ID NO: 80 - protein, 1945 aa, Homo sapiens
  MISC_FEATURE (1)..(1945): myosin, heavy chain 11, smooth muscle (MYH11),transcript variant SM2B
MAQKGQLSDDEKFLFVDKNFINSPVAQADWAAKRLVWVPSEKQGFEAASIKEEKGDEVVVELVENGKKVTVGKDDIQKMNPPKFSKVEDMAELTCLNEASVLHNLRERYFSGLIYTYSGLFCVVVNPYKHLPIYSEKIVDMYKGKKRHEMPPHIYAIADTAYRSMLQDREDQSILCTGESGAGKTENTKKVIQYLAVVASSHKGKKDTSITQGPSFAYGELEKQLLQANPILEAFGNAKTVKNDNSSRFGKFIRINFDVTGYIVGANIETYLLEKSRAIRQARDERTFHIFYYMIAGAKEKMRSDLLLEGFNNYTFLSNGFVPIPAAQDDEMFQETVEAMAIMGFSEEEQLSILKVVSSVLQLGNIVFKKERNTDQASMPDNTAAQKVCHLMGINVTDFTRSILTPRIKVGRDVVQKAQTKEQADFAVEALAKATYERLFRWILTRVNKALDKTHRQGASFLGILDIAGFEIFEVNSFEQLCINYTNEKLQQLFNHTMFILEQEEYQREGIEWNFIDFGLDLQPCIELIERPNNPPGVLALLDEECWFPKATDKSFVEKLCTEQGSHPKFQKPKQLKDKTEFSIIHYAGKVDYNASAWLTKNMDPLNDNVTSLLNASSDKFVADLWKDVDRIVGLDQMAKMTESSLPSASKTKKGMFRTVGQLYKEQLGKLMTTLRNTTPNFVRCIIPNHEKRSGKLDAFLVLEQLRCNGVLEGIRICRQGFPNRIVFQEFRQRYEILAANAIPKGFMDGKQACILMIKALELDPNLYRIGQSKIFFRTGVLAHLEEERDLKITDVIMAFQAMCRGYLARKAFAKRQQQLTAMKVIQRNCAAYLKLRNWQWWRLFTKVKPLLQVTRQEEEMQAKEDELQKTKERQQKAENELKELEQKHSQLTEEKNLLQEQLQAETELYAEAEEMRVRLAAKKQELEEILHEMEARLEEEEDRGQQLQAERKKMAQQMLDLEEQLEEEEAARQKLQLEKVTAEAKIKKLEDEILVMDDQNNKLSKERKLLEERISDLTTNLAEEEEKAKNLTKLKNKHESMISELEVRLKKEEKSRQELEKLKRKLEGDASDFHEQIADLQAQIAELKMQLAKKEEELQAALARLDDEIAQKNNALKKIRELEGHISDLQEDLDSERAARNKAEKQKRDLGEELEALKTELEDTLDSTATQQELRAKREQEVTVLKKALDEETRSHEAQVQEMRQKHAQAVEELTEQLEQFKRAKANLDKNKQTLEKENADLAGELRVLGQAKQEVEHKKKKLEAQVQELQSKCSDGERARAELNDKVHKLQNEVESVTGMLNEAEGKAIKLAKDVASLSSQLQDTQELLQEETRQKLNVSTKLRQLEEERNSLQDQLDEEMEAKQNLERHISTLNIQLSDSKKKLQDFASTVEALEEGKKRFQKEIENLTQQYEEKAAAYDKLEKTKNRLQQELDDLVVDLDNQRQLVSNLEKKQRKFDQLLAEEKNISSKYADERDRAEAEAREKETKALSLARALEEALEAKEELERTNKMLKAEMEDLVSSKDDVGKNVHELEKSKRALETQMEEMKTQLEELEDELQATEDAKLRLEVNMQALKGQFERDLQARDEQNEEKRRQLQRQLHEYETELEDERKQRALAAAAKKKLEGDLKDLELQADSAIKGREEAIKQLRKLQAQMKDFQRELEDARASRDEIFATAKENEKKAKSLEADLMQLQEDLAAAERARKQADLEKEELAEELASSLSGRNALQDEKRRLEARIAQLEEELEEEQGNMEAMSDRVRKATQQAEQLSNELATERSTAQKNESARQQLERQNKELRSKLHEMEGAVKSKFKSTIAALEAKIAQLEEQVEQEAREKQAATKSLKQKDKKLKEILLQVEDERKMAEQYKEQAEKGNARVKQLKRQLEEAEEESQRINANRRKLQRELDEATESNEAMGREVNALKSKLRGPPPQETSQ

SEQ ID NO: 81 - DNA, 5992 bp, Homo sapiens
  misc_feature (1)..(5992): myosin, heavy chain 13, skeletal muscle (MYH13)
aaattgctgtgaccgcagcatctctaggaagacgctttattcctgaaggacactgactgtcacttgggaaccaagaagccctctgcagtcatgagctctgacgcagaaatggccatttttggagaagcagctccctacctccggaaaccagagaaggagagaatcgaggctcaaaatcgtccattcgattccaagaaagcctgctttgtagcggataataaggaaatgtatgtgaaaggcatgatccagactagggaaaatgacaaagtcatagtcaagaccctcgatgaccggatgctcactctgaacaatgaccaggtcttccccatgaaccctcccaaatttgacaagatcgaggacatggccatgatgactcacctgcatgaacctgctgttctgtacaacctcaaagagcgctatgcagcctggatgatctacacctactcaggcctcttctgtgtcaccgtcaacccctacaagtggctgccggtgtacaagcccgaggtggtggctgcctacagaggcaaaaagcgccaggaggccccgccccacatcttctccatctctgacaatgcctatcagttcatgctgactgatcgagacaaccagtctatcctcatcaccggagaatccggggctgggaagactgtgaacaccaagcgtgtcatccagtattttgcaacaattgcagttaccggggacaagaagaaggagacacagccaggcaaaatgcagggaaccctagaggatcagatcatccaggccaacccactgctggaggcctttggaaatgccaagactgtgaggaatgacaactcctcaagatttgggaagttcattcggattcattttggagccacaggaaagctggcatcggcagacatcgaaacttatctgttagaaaaatccagagtgacgtttcaattatccagtgagagaagctatcatattttctaccaaattatgtcaaacaagaagccagaactaattgacctgcttctgatctccaccaaccccttcgacttccccttcgtgagccaaggagaggtcacggtagccagtatcgatgacagtgaagaactgctggcgacagataatgccattgacatcctgggcttcagctcagaggagaaagtcgggatctacaaactgacgggagccgtgatgcattatgggaacatgaagttcaagcagaagcagcgtgaggagcaggcggagccagacggcaccgaagtggctgacaaagccggatacctgatgggactgaattctgcagaaatgctgaagggcctgtgctgtccaagggtgaaggttggcaatgaatatgtcactaaagggcaaaatgtccagcaggtgaccaattcggtgggtgctctggccaaagccgtctacgagaagatgttcctgtggatggtcacccgcatcaaccagcagctggacaccaagcagcccaggcagtacttcatcggggtcttggacattgctggctttgagatctttgatttcaacagcctggagcagctgtgcatcaacttcaccaatgagaaactgcaacagtttttcaaccaccacatgttcgtgctggagcaggaagagtacaagaaggaaggcatcgagtgggagttcattgacttcggaatggacctggctgcctgcatcgagctcatcgagaagcctatgggcatcttctccatcctggaagaggagtgcatgttccccaaggcaacagacacctccttcaagaacaagctgtatgaccagcatcttggaaaatccaacaacttccagaagcccaagcctgccaaaggcaaggctgaggctcacttctcgctggtgcactatgccggcaccgtggactacaacatcgccggctggctggacaaaaacaaggaccccctgaacgagactgtggtggggctgtaccagaagtcttcgctgaagcttctctccttccttttttccaactatgctggtgcagagacaggcgactccggaggaagcaagaagggcgggaagaagaagggctcctctttccagaccgtgtcggccgtgttcagggaaaatttaaacaaattgatgactaacttaaggagcacccaccctcactttgtacgatgtctgattcccaatgagaccaagactcctggtgtgatggaccactacttggtcatgcaccagctgcgctgtaacggggtcctcgagggcatccggatttgcaggaagggattccccagccggatcctctatgctgacttcaagcagcggtaccggatcctcaatgccagtgctatccctgaagggcagttcattgacagcaaaaatgcctcagagaagctcctcaactccatcgatgtggaccgggagcagttcaggttcggcaacaccaaggtgtttttcaaagctgggctcctgggacttttggaggagatgagagatgagaagctggtgacgctgatgacaagcacgcaggcggtgtgcagggggtacctgatgcgggtggagttcaagaagatgatggagaggagggactccatcttctgcatccagtacaacatccgctcttttatgaacgtcaagcactggccctggatgaacctgttcttcaaaatcaagcccctgctgaagagtgcagaggccgagaaggagatggccaccatgaaggaagactttgagaggaccaaggaagaactggcccgatctgaggctcgccggaaggagctggaggagaaaatggtctccctcctgcaggagaagaatgacctccaattgcaggtccagtctgaaacagaaaatctgatggacgctgaggaacggtgtgaaggactcatcaaaagcaagatcctactggaagcaaaagtcaaggagctgacggagagattggaagaggaagaggagatgaattctgaattggttgccaagaagaggaatctggaagataaatgctcctctctcaagagagacattgatgacctggagctgaccttgacgaaagttgaaaaggagaagcatgccacagagaacaaggtaaagaatctttccgaagaaatgacagcacttgaagaaaacatttccaaattgaccaaagaaaagaaatctctacaggaggcccatcagcaaacactggatgatcttcaggtggaagaagataaagtcaatggtctaatcaaaataaatgccaagcttgaacagcaaacagatgatcttgagggttccttagagcaggagaagaaactgcgggcggacttggaaagggcgaagaggaagctggaaggagatctgaaaatgtcccaggaatccattatggatctagaaaatgacaagcagcaaatagaagagaaattgaaaaagaaggagtttgaactcagtcagttacaagccaaaatagatgacgaacaagtccacagtttgcagtttcaaaagaagattaaagaactgcaagcccgcatagaagagctggaggaggaaattgaagcggaacacacgctcagagccaagattgagaagcagcgctcagatctggccagggaactggaggagatcagcgagaggctggaagaagccagtggggccacttcagcccagattgagatgaacaagaagagggaggctgagttccagaaaatgcgcagggacctggaggaggccaccctgcagcacgaagccacagcagccaccctgaggaagaagcaagcagatagtgtggccgagcttggggagcagattgacaacctgcagcgggtgaagcagaagctggagaaggagaagagcgagctgaagatggagattgacgacatggccagcaacatcgaggctctctccaagtcaaagagtaacatagaaagaacgtgccggacggtagaagatcaatttagtgaaatcaaagccaaggacgagcaacagacacagttgatccatgatctgaacatgcagaaagcaagactgcagacccaaaatggggagctgagccaccgagtggaagagaaggagtctctgatttcacagctgaccaaaagcaagcaggccctcacccagcagctggaggagcttaagaggcaaatggaagaagaaaccaaggccaagaacgccatggcgcacgccctgcagtcctcccgccacgactgtgacctgctgcgggaacagtatgaggaggagcaggaagccaaggccgagctgcagagggcgctgtccaaggccaacagtgaggttgcccagtggaggaccaaatacgagacggacgccattcagcgcacagaggagctggaggaggccaagaaaaaactggcccagaggctccaggaagcagaggagaacacggagacggcgaactccaagtgcgcatcgttggagaaaaccaagcagaggctgcagggagaggtggaggatctgatgcgggatctggagcgctcccacaccgcctgtgccacactggacaagaagcagaggaacttcgacaaggtccttgcagagtggaagcaaaagctggacgaaagccaggctgagttggaagctgctcagaaggagtccaggtcactcagcactgaactcttcaagatgaggaatgcctatgaggaggtggtggaccagttagagacactgaggcgagagaacaaaaatctgcaagaagagatttccgacttaactgagcagattgcagaaactggcaagaatcttcaggaagcggaaaagaccaagaagctagtggagcaggaaaagtcagatctgcaggtcgccttagaagaagtggagggttccttggaacacgaggagagcaagatcttgcgcgtgcagctagagctgagccaggtgaaatccgagctagaccgcaaggtcattgagaaggatgaagaaatcgagcagctaaaaagaaacagccagcgggcagcagaggccctgcagagcgtgctggatgctgaaatccgcagccggaacgacgccctgaggctaaagaagaagatggagggagaccttaatgagatggagattcagctgggccactccaaccgccagatggcagagacccagaagcatctgcgcacggtccagggccagctcaaggactcccagctgcatctcgatgacgccctgaggagcaatgaggacctcaaggagcagctggccatcgtggagcgcaggaatggcctcctgctggaggagctggaggaaatgaaggtggccctggaacagacggagcggacccgcaggctgtcagagcaggagctgctggacgccagcgaccgcgtgcagctcctgcactcccagaacacaagcctgataaataccaagaaaaaactggaggctgacatagctcagtgccaggcagaggtggagaactcgatccaggagtccaggaacgcagaggagaaggccaagaaggccatcacggatgctgccatgatggctgaggagctaaagaaggaacaggacaccagcgcccacctggagcggatgaagaagaacctggagcagacggtgaaggacctgcagcaccgtctagatgaggctgaacaactggcgctgaagggcgggaagaagcagatccagaaactggagaaccgggtgcgggagctggaaaatgagcttgatgtggaacagaagaggggagctgaagccctgaagggagcccacaagtacgaacgcaaagtcaaggagatgacttaccaggctgaggaggaccacaagaatatccttaggctccaggacctggtggacaagctgcaggccaaagtgaagtcttacaagaggcaggctgaggaggcggaggagcaggccaacacgcagctgtccagatgccggagagtccagcatgagctagaggaggccgcggagagggcggacatcgctgagtcccaggtcaacaagctgagggccaagagccgagacgtgggcagccagaagatggaagaatgaggctcacctgatgctcgttgccatgggacacctccgagagagtggagggaaaatgtgtgagaaataaattctcctaaatactcgg

SEQ ID NO: 82 - protein, 1938 aa, Homo sapiens
  MISC_FEATURE (1)..(1938): myosin, heavy chain 13, skeletal muscle (MYH13)
MSSDAEMAIFGEAAPYLRKPEKERIEAQNRPFDSKKACFVADNKEMYVKGMIQTRENDKVIVKTLDDRMLTLNNDQVFPMNPPKFDKIEDMAMMTHLHEPAVLYNLKERYAAWMIYTYSGLFCVTVNPYKWLPVYKPEVVAAYRGKKRQEAPPHIFSISDNAYQFMLTDRDNQSILITGESGAGKTVNTKRVIQYFATIAVTGDKKKETQPGKMQGTLEDQIIQANPLLEAFGNAKTVRNDNSSRFGKFIRIHFGATGKLASADIETYLLEKSRVTFQLSSERSYHIFYQIMSNKKPELIDLLLISTNPFDFPFVSQGEVTVASIDDSEELLATDNAIDILGFSSEEKVGIYKLTGAVMHYGNMKFKQKQREEQAEPDGTEVADKAGYLMGLNSAEMLKGLCCPRVKVGNEYVTKGQNVQQVTNSVGALAKAVYEKMFLWMVTRINQQLDTKQPRQYFIGVLDIAGFEIFDFNSLEQLCINFTNEKLQQFFNHHMFVLEQEEYKKEGIEWEFIDFGMDLAACIELIEKPMGIFSILEEECMFPKATDTSFKNKLYDQHLGKSNNFQKPKPAKGKAEAHFSLVHYAGTVDYNIAGWLDKNKDPLNETVVGLYQKSSLKLLSFLFSNYAGAETGDSGGSKKGGKKKGSSFQTVSAVFRENLNKLMTNLRSTHPHFVRCLIPNETKTPGVMDHYLVMHQLRCNGVLEGIRICRKGFPSRILYADFKQRYRILNASAIPEGQFIDSKNASEKLLNSIDVDREQFRFGNTKVFFKAGLLGLLEEMRDEKLVTLMTSTQAVCRGYLMRVEFKKMMERRDSIFCIQYNIRSFMNVKHWPWMNLFFKIKPLLKSAEAEKEMATMKEDFERTKEELARSEARRKELEEKMVSLLQEKNDLQLQVQSETENLMDAEERCEGLIKSKILLEAKVKELTERLEEEEEMNSELVAKKRNLEDKCSSLKRDIDDLELTLTKVEKEKHATENKVKNLSEEMTALEENISKLTKEKKSLQEAHQQTLDDLQVEEDKVNGLIKINAKLEQQTDDLEGSLEQEKKLRADLERAKRKLEGDLKMSQESIMDLENDKQQIEEKLKKKEFELSQLQAKIDDEQVHSLQFQKKIKELQARIEELEEEIEAEHTLRAKIEKQRSDLARELEEISERLEEASGATSAQIEMNKKREAEFQKMRRDLEEATLQHEATAATLRKKQADSVAELGEQIDNLQRVKQKLEKEKSELKMEIDDMASNIEALSKSKSNIERTCRTVEDQFSEIKAKDEQQTQLIHDLNMQKARLQTQNGELSHRVEEKESLISQLTKSKQALTQQLEELKRQMEEETKAKNAMAHALQSSRHDCDLLREQYEEEQEAKAELQRALSKANSEVAQWRTKYETDAIQRTEELEEAKKKLAQRLQEAEENTETANSKCASLEKTKQRLQGEVEDLMRDLERSHTACATLDKKQRNFDKVLAEWKQKLDESQAELEAAQKESRSLSTELFKMRNAYEEVVDQLETLRRENKNLQEEISDLTEQIAETGKNLQEAEKTKKLVEQEKSDLQVALEEVEGSLEHEESKILRVQLELSQVKSELDRKVIEKDEEIEQLKRNSQRAAEALQSVLDAEIRSRNDALRLKKKMEGDLNEMEIQLGHSNRQMAETQKHLRTVQGQLKDSQLHLDDALRSNEDLKEQLAIVERRNGLLLEELEEMKVALEQTERTRRLSEQELLDASDRVQLLHSQNTSLINTKKKLEADIAQCQAEVENSIQESRNAEEKAKKAITDAAMMAEELKKEQDTSAHLERMKKNLEQTVKDLQHRLDEAEQLALKGGKKQIQKLENRVRELENELDVEQKRGAEALKGAHKYERKVKEMTYQAEEDHKNILRLQDLVDKLQAKVKSYKRQAEEAEEQANTQLSRCRRVQHELEEAAERADIAESQVNKLRAKSRDVGSQKMEE

SEQ ID NO: 83 - DNA, 6831 bp, Homo sapiens
  misc_feature (1)..(6831): myosin, heavy chain 14 (MYH14), transcript variant 1
ctctttctccccaggccgaagcctcgggacggccctggaagccgaccatggcagccgtgaccatgtcggtgcccgggcggaaggcgccccccaggccgggcccagtgcccgaggcggcccagccgttcctgttcacgccccgcgggcccagcgcgggtggcgggcctggctcgggcacctccccgcaggtggagtggacggcccggcgtctcgtgtgggtgccttcggagcttcacgggttcgaggcggcggcgctgcgggacgaaggcgaggaggaggcggaggtggagctggcggagagcgggaggcggctgcgactgccgcgggaccagatccagcgcatgaacccgcccaagttcagcaaggccgaggacatggccgagctgacctgcctcaacgaggcctcggtcctgcacaacctccgggagcggtactactccggcctcatctacacgtactccggccttttctgtgtggtcatcaacccgtacaagcagcttcccatctacacagaagccattgtggagatgtaccggggcaagaagcgccacgaggtgccaccccacgtgtacgcagtgaccgagggggcctatcggagcatgctgcaggatcgtgaggaccagtccattctctgcactggagagtctggagctgggaagacggaaaacaccaagaaggtcatccagtacctcgcccacgtggcgtcgtctccaaagggcaggaaggagccgggtgtccccgcctccgtcagcaccgtgtcttatggtgagctggagcggcagctgcttcaggccaaccccatcctagaggcctttggcaatgccaagacagtgaagaatgacaactcctcccgattcggcaaattcatccgcatcaactttgatgttgccgggtacatcgtgggcgccaacattgagacctacctgctggagaagtcgcgggccatccgccaggccaaggacgagtgcagcttccacatcttctaccagctgctggggggcgctggagagcagctcaaagccgacctcctcctcgagccctgctcccactaccggttcctgaccaacgggccgtcatcctctcccggccaggagcgggaactcttccaggagacgctggagtcgctgcgggtcctgggattcagccacgaggaaatcatctccatgctgcggatggtctcagcagttctccagtttggcaacattgccttgaagagagaacggaacaccgatcaagccaccatgcctgacaacacagctgcacagaagctctgccgcctcttgggactgggggtgacggatttctcccgagccttgctcacccctcgcatcaaagttggccgagactatgtgcagaaagcccagactaaggaacaggctgacttcgcgctggaggccctggccaaggccacctacgagcgcctcttccgctggctggttctgcgcctcaaccgggccttggaccgcagcccccgccaaggcgcctccttcctgggcatcctggacatcgcgggctttgagatcttccagctgaactccttcgagcagctctgcatcaactacaccaacgagaagctgcagcagctcttcaaccacaccatgttcgtgctggagcaggaggagtaccagcgtgagggcatcccctggaccttcctcgactttggcctcgacctgcagccctgcatcgacctcatcgagcggccggccaacccccctggactcctggccctgctggatgaggagtgctggttcccgaaggccacagacaagtcgtttgtggagaaggtagcccaggagcagggcggccaccccaagttccagcggccgaggcacctgcgggatcaggccgacttcagtgttctccactacgcgggcaaggtcgactacaaggccaacgagtggctgatgaaaaacatggaccctctgaatgacaacgtcgcagccttgctccaccagagcacagaccggctgacggcagagatctggaaagacgtggagggcatcgtggggctggaacaggtgagcagcctgggcgacggcccaccaggtggccgcccccgtcggggtatgttccggacagtgggacagctctacaaggagtccctgagccgcctcatggccacactcagcaacaccaaccccagttttgtccgctgcattgtccccaaccacgagaagagggccgggaagctggagccacggctggtgctggaccagcttcgctgcaacggggtcctggagggcatccgcatctgtcgccagggcttccccaaccgcatcctcttccaggagttccggcagcgatacgagatcctgacacccaatgccatccccaagggcttcatggatgggaagcaggcctgtgaaaagatgatccaggcgctggaactggaccccaacctctaccgcgtgggacagagcaagatcttcttccgggctggggtcctggcccagctggaagaggagcgagacctgaaggtcaccgacatcatcgtctccttccaggcagctgcccggggatacctggctcgcagggccttccagaagcgccagcagcagcagagcgccctgagggtgatgcagcggaactgcgcggcctacctcaagctgagacactggcagtggtggcggctgtttaccaaggtgaagccactgctgcaggtgacgcggcaggatgaggtgctgcaggcacgggcccaggagctgcagaaagtgcaggagctacagcagcagagcgcccgcgaagttggggagctccagggccgagtggcacagctggaagaggagcgcgcccgcctggcagagcaattgcgagcagaggcagaactgtgtgcagaggccgaggagacgcgggggaggctggcagcccgcaagcaggagctggagctggtggtgtcagagctggaggctcgcgtgggcgaggaggaggagtgcagccgtcaaatgcaaaccgagaagaagaggctgcagcagcacatacaggagctagaggcccaccttgaggctgaggagggtgcgcggcagaagctgcagctggagaaggtgacgacagaggcaaaaatgaagaaatttgaagaggacctgctgctcctggaagaccagaattccaagctgagcaaggagcggaagctgctggaagatcgtctggccgagttctcatcccaggcagctgaggaggaggagaaggtcaagagcctcaataagctacggctcaaatatgaggccacaatcgcagacatggaggaccgcctacggaaggaggagaagggtcgccaggagctggagaagctgaagcggaggctggatggggagagctcagagctgcaggagcagatggtggagcagcaacagcgggcagaggagctgcgggcccagctgggccggaaggaggaggagctgcaggctgccctggccagggcagaagacgagggtggggcccgggcccagctgctgaaatccctgcgggaggctcaagcagccctggccgaggcccaggaggacctggagtctgagcgtgtggccaggaccaaggcggagaagcagcgccgggacctgggcgaggagctggaggcgctgcggggcgagctggaggacacgctggactccaccaacgcacagcaggagctccggtccaagagggaacaggaggtgacggagctgaagaagactctggaggaggagactcgcatccacgaggcggcagtgcaggagctgaggcagcgccacggccaggccctgggggagctggcggagcagctggagcaggcccggaggggcaaaggtgcatgggagaagacccggctggccctggaggccgaggtgtccgagctgcgggcagaactgagcagcctgcagactgcacgtcaggagggtgagcagcggaggcgccgcctggagttacagctgcaggaggtgcagggccgggctggtgatggggagagggcacgagcggaggctgctgagaagctgcagcgagcccaggctgaactggagaatgtgtctggggcgctgaacgaggctgagtccaaaaccatccgtcttagcaaggagctgagcagcacagaagcccagctgcacgatgcccaggagctgctgcaggaggagaccagggcgaaattggccttggggtcccgggtgcgagccatggaggctgaggcagccgggctgcgtgagcagctggaggaggaggcagctgccagggaacgggcgggccgtgaactgcagactgcccaggcccagctttccgagtggcggcggcgccaggaggaggaggcaggggcactggaggcaggggaggaggcacggcgccgggcagcccgggaggccgaggccctgacccagcgcctggcagaaaagacagagaccgtggatcggctggagcggggccgccgccggctgcagcaggagctggacgacgccaccatggacctggagcagcagcggcagcttgtgagcaccctggagaagaagcagcgcaagtttgaccagcttctggcagaggagaaggcagctgtacttcgggcagtggaggaacgtgagcgggccgaggcagagggccgggagcgtgaggctcgggccctgtcactgacacgggcactggaggaggagcaggaggcacgtgaggagctggagcggcagaaccgggccctgcgggctgagctggaggcactgctgagcagcaaggatgacgtcggcaagagcgtgcatgagctggaacgagcctgccgggtagcagaacaggcagccaatgatctgcgagcacaggtgacagaactggaggatgagctgacagcggccgaggatgccaagctgcgtctggaggtgactgtgcaggctctcaagactcagcatgagcgtgacctgcagggccgtgatgaggctggtgaagagaggcggaggcagctggccaagcagctgagagatgcagaggtggagcgggatgaggagcggaagcagcgcactctggccgtggctgcccgcaagaagctggagggagagctggaggagctgaaggctcagatggcctctgccggccagggcaaggaggaggcggtgaagcagcttcgcaagatgcaggcccagatgaaggagctatggcgggaggtggaggagacacgcacctcccgggaggagatcttctcccagaatcgggaaagtgaaaagcgcctcaagggcctggaggctgaggtgctgcggctgcaggaggaactggccgcctcggaccgtgctcggcggcaggcccagcaggaccgggatgagatggcagatgaggtggccaatggtaaccttagcaaggcagccattctggaggagaagcgtcagctggaggggcgcctggggcagttggaggaagagctggaggaggagcagagcaactcggagctgctcaatgaccgctaccgcaagctgctcctgcaggtagagtcactgaccacagagctgtcagctgagcgcagtttctcagccaaggcagagagcgggcggcagcagctggaacggcagatccaggagctacggggacgcctgggtgaggaggatgctggggcccgtgcccgccacaagatgaccattgctgcccttgagtctaagttggcccaggctgaggagcagctagagcaagagaccagagagcgcatcctctctggaaagctggtgcgcagagctgagaagcggcttaaagaggtggtgctccaggtggaggaggagcggagggtggctgaccagctccgggaccagctggagaagggaaaccttcgagtcaagcagctgaagcggcagctggaggaggccgaggaggaggcatcccgggctcaggccggccgccggaggctgcagcgtgagctggaagatgtcacagagtcggccgagtccatgaaccgtgaagtgaccacactgaggaaccggcttcgacgcggccccctcaccttcaccacccgcacggtgcgccaggtcttccgactagaggagggcgtggcatccgacgaggaggcagaggaagcacagcctgggtctgggccatccccggagcctgaggggtccccaccagcccacccccagtgaccctaccctgtccccagatgcactaacagatggggcccagcccccttcctccctggaccccacgggcccctgtcccaggaaccccgccctctgacttcttgccctttggaaatggtgcagcactctggcatttatcacccccacctgggtcccctgcaacctcccatcaaaggatgacccctaaacacagaggagcggggcaggcagggaggcaatgactggagctaccttgcttgttgggggactgggtacagttggcaagctgtgtttccatcagctccctgtcctcctttcttccctcgttattgatctatagacattaggaagggagtgagacggctcctccaccatcctcagccagtgcaacccattccctctgcttctctctctctctctctctctccctccctctccttccctaccctctcaccatctttcttggcctctctgagggtctctctgtgcatctttttaggaatctcgctctcactctctacgtagccactctccttcccccatttctgcgtccacccctgaactcctgagcgacagaagccccaggcctccaccagccttgaacccttgcaaaggggcaggacaaggggacccctctcactcctgctgctgcccatgctctgccctcccttctggttgctctgagggttcggagcttccctctgggactaaaggagtgtcctttaccctcccagcctccaggctctggcagaaataaactccaacccgactggaccataaaaaaaaaaaaaaaaaa

SEQ ID NO: 84 - protein, 2003 aa, Homo sapiens
  MISC_FEATURE (1)..(2003): myosin, heavy chain 14 (MYH14), transcript variant 1
MAAVTMSVPGRKAPPRPGPVPEAAQPFLFTPRGPSAGGGPGSGTSPQVEWTARRLVWVPSELHGFEAAALRDEGEEEAEVELAESGRRLRLPRDQIQRMNPPKFSKAEDMAELTCLNEASVLHNLRERYYSGLIYTYSGLFCVVINPYKQLPIYTEAIVEMYRGKKRHEVPPHVYAVTEGAYRSMLQDREDQSILCTGESGAGKTENTKKVIQYLAHVASSPKGRKEPGVPASVSTVSYGELERQLLQANPILEAFGNAKTVKNDNSSRFGKFIRINFDVAGYIVGANIETYLLEKSRAIRQAKDECSFHIFYQLLGGAGEQLKADLLLEPCSHYRFLTNGPSSSPGQERELFQETLESLRVLGFSHEEIISMLRMVSAVLQFGNIALKRERNTDQATMPDNTAAQKLCRLLGLGVTDFSRALLTPRIKVGRDYVQKAQTKEQADFALEALAKATYERLFRWLVLRLNRALDRSPRQGASFLGILDIAGFEIFQLNSFEQLCINYTNEKLQQLFNHTMFVLEQEEYQREGIPWTFLDFGLDLQPCIDLIERPANPPGLLALLDEECWFPKATDKSFVEKVAQEQGGHPKFQRPRHLRDQADFSVLHYAGKVDYKANEWLMKNMDPLNDNVAALLHQSTDRLTAEIWKDVEGIVGLEQVSSLGDGPPGGRPRRGMFRTVGQLYKESLSRLMATLSNTNPSFVRCIVPNHEKRAGKLEPRLVLDQLRCNGVLEGIRICRQGFPNRILFQEFRQRYEILTPNAIPKGFMDGKQACEKMIQALELDPNLYRVGQSKIFFRAGVLAQLEEERDLKVTDIIVSFQAAARGYLARRAFQKRQQQQSALRVMQRNCAAYLKLRHWQWWRLFTKVKPLLQVTRQDEVLQARAQELQKVQELQQQSAREVGELQGRVAQLEEERARLAEQLRAEAELCAEAEETRGRLAARKQELELVVSELEARVGEEEECSRQMQTEKKRLQQHIQELEAHLEAEEGARQKLQLEKVTTEAKMKKFEEDLLLLEDQNSKLSKERKLLEDRLAEFSSQAAEEEEKVKSLNKLRLKYEATIADMEDRLRKEEKGRQELEKLKRRLDGESSELQEQMVEQQQRAEELRAQLGRKEEELQAALARAEDEGGARAQLLKSLREAQAALAEAQEDLESERVARTKAEKQRRDLGEELEALRGELEDTLDSTNAQQELRSKREQEVTELKKTLEEETRIHEAAVQELRQRHGQALGELAEQLEQARRGKGAWEKTRLALEAEVSELRAELSSLQTARQEGEQRRRRLELQLQEVQGRAGDGERARAEAAEKLQRAQAELENVSGALNEAESKTIRLSKELSSTEAQLHDAQELLQEETRAKLALGSRVRAMEAEAAGLREQLEEEAAARERAGRELQTAQAQLSEWRRRQEEEAGALEAGEEARRRAAREAEALTQRLAEKTETVDRLERGRRRLQQELDDATMDLEQQRQLVSTLEKKQRKFDQLLAEEKAAVLRAVEERERAEAEGREREARALSLTRALEEEQEAREELERQNRALRAELEALLSSKDDVGKSVHELERACRVAEQAANDLRAQVTELEDELTAAEDAKLRLEVTVQALKTQHERDLQGRDEAGEERRRQLAKQLRDAEVERDEERKQRTLAVAARKKLEGELEELKAQMASAGQGKEEAVKQLRKMQAQMKELWREVEETRTSREEIFSQNRESEKRLKGLEAEVLRLQEELAASDRARRQAQQDRDEMADEVANGNLSKAAILEEKRQLEGRLGQLEEELEEEQSNSELLNDRYRKLLLQVESLTTELSAERSFSAKAESGRQQLERQIQELRGRLGEEDAGARARHKMTIAALESKLAQAEEQLEQETRERILSGKLVRRAEKRLKEVVLQVEEERRVADQLRDQLEKGNLRVKQLKRQLEEAEEEASRAQAGRRRLQRELEDVTESAESMNREVTTLRNRLRRGPLTFTTRTVRQVFRLEEGVASDEEAEEAQPGSGPSPEPEGSPPAHPQ

SEQ ID NO: 85 - DNA, 6807 bp, Homo sapiens
  misc_feature (1)..(6807): myosin, heavy chain 14 (MYH14), transcript variant 2
ctctttctccccaggccgaagcctcgggacggccctggaagccgaccatggcagccgtgaccatgtcggtgcccgggcggaaggcgccccccaggccgggcccagtgcccgaggcggcccagccgttcctgttcacgccccgcgggcccagcgcgggtggcgggcctggctcgggcacctccccgcaggtggagtggacggcccggcgtctcgtgtgggtgccttcggagcttcacgggttcgaggcggcggcgctgcgggacgaaggcgaggaggaggcggaggtggagctggcggagagcgggaggcggctgcgactgccgcgggaccagatccagcgcatgaacccgcccaagttcagcaaggccgaggacatggccgagctgacctgcctcaacgaggcctcggtcctgcacaacctccgggagcggtactactccggcctcatctacacgtactccggccttttctgtgtggtcatcaacccgtacaagcagcttcccatctacacagaagccattgtggagatgtaccggggcaagaagcgccacgaggtgccaccccacgtgtacgcagtgaccgagggggcctatcggagcatgctgcaggatcgtgaggaccagtccattctctgcactggagagtctggagctgggaagacggaaaacaccaagaaggtcatccagtacctcgcccacgtggcgtcgtctccaaagggcaggaaggagccgggtgtccccggtgagctggagcggcagctgcttcaggccaaccccatcctagaggcctttggcaatgccaagacagtgaagaatgacaactcctcccgattcggcaaattcatccgcatcaactttgatgttgccgggtacatcgtgggcgccaacattgagacctacctgctggagaagtcgcgggccatccgccaggccaaggacgagtgcagcttccacatcttctaccagctgctggggggcgctggagagcagctcaaagccgacctcctcctcgagccctgctcccactaccggttcctgaccaacgggccgtcatcctctcccggccaggagcgggaactcttccaggagacgctggagtcgctgcgggtcctgggattcagccacgaggaaatcatctccatgctgcggatggtctcagcagttctccagtttggcaacattgccttgaagagagaacggaacaccgatcaagccaccatgcctgacaacacagctgcacagaagctctgccgcctcttgggactgggggtgacggatttctcccgagccttgctcacccctcgcatcaaagttggccgagactatgtgcagaaagcccagactaaggaacaggctgacttcgcgctggaggccctggccaaggccacctacgagcgcctcttccgctggctggttctgcgcctcaaccgggccttggaccgcagcccccgccaaggcgcctccttcctgggcatcctggacatcgcgggctttgagatcttccagctgaactccttcgagcagctctgcatcaactacaccaacgagaagctgcagcagctcttcaaccacaccatgttcgtgctggagcaggaggagtaccagcgtgagggcatcccctggaccttcctcgactttggcctcgacctgcagccctgcatcgacctcatcgagcggccggccaacccccctggactcctggccctgctggatgaggagtgctggttcccgaaggccacagacaagtcgtttgtggagaaggtagcccaggagcagggcggccaccccaagttccagcggccgaggcacctgcgggatcaggccgacttcagtgttctccactacgcgggcaaggtcgactacaaggccaacgagtggctgatgaaaaacatggaccctctgaatgacaacgtcgcagccttgctccaccagagcacagaccggctgacggcagagatctggaaagacgtggagggcatcgtggggctggaacaggtgagcagcctgggcgacggcccaccaggtggccgcccccgtcggggtatgttccggacagtgggacagctctacaaggagtccctgagccgcctcatggccacactcagcaacaccaaccccagttttgtccgctgcattgtccccaaccacgagaagagggccgggaagctggagccacggctggtgctggaccagcttcgctgcaacggggtcctggagggcatccgcatctgtcgccagggcttccccaaccgcatcctcttccaggagttccggcagcgatacgagatcctgacacccaatgccatccccaagggcttcatggatgggaagcaggcctgtgaaaagatgatccaggcgctggaactggaccccaacctctaccgcgtgggacagagcaagatcttcttccgggctggggtcctggcccagctggaagaggagcgagacctgaaggtcaccgacatcatcgtctccttccaggcagctgcccggggatacctggctcgcagggccttccagaagcgccagcagcagcagagcgccctgagggtgatgcagcggaactgcgcggcctacctcaagctgagacactggcagtggtggcggctgtttaccaaggtgaagccactgctgcaggtgacgcggcaggatgaggtgctgcaggcacgggcccaggagctgcagaaagtgcaggagctacagcagcagagcgcccgcgaagttggggagctccagggccgagtggcacagctggaagaggagcgcgcccgcctggcagagcaattgcgagcagaggcagaactgtgtgcagaggccgaggagacgcgggggaggctggcagcccgcaagcaggagctggagctggtggtgtcagagctggaggctcgcgtgggcgaggaggaggagtgcagccgtcaaatgcaaaccgagaagaagaggctgcagcagcacatacaggagctagaggcccaccttgaggctgaggagggtgcgcggcagaagctgcagctggagaaggtgacgacagaggcaaaaatgaagaaatttgaagaggacctgctgctcctggaagaccagaattccaagctgagcaaggagcggaagctgctggaagatcgtctggccgagttctcatcccaggcagctgaggaggaggagaaggtcaagagcctcaataagctacggctcaaatatgaggccacaatcgcagacatggaggaccgcctacggaaggaggagaagggtcgccaggagctggagaagctgaagcggaggctggatggggagagctcagagctgcaggagcagatggtggagcagcaacagcgggcagaggagctgcgggcccagctgggccggaaggaggaggagctgcaggctgccctggccagggcagaagacgagggtggggcccgggcccagctgctgaaatccctgcgggaggctcaagcagccctggccgaggcccaggaggacctggagtctgagcgtgtggccaggaccaaggcggagaagcagcgccgggacctgggcgaggagctggaggcgctgcggggcgagctggaggacacgctggactccaccaacgcacagcaggagctccggtccaagagggaacaggaggtgacggagctgaagaagactctggaggaggagactcgcatccacgaggcggcagtgcaggagctgaggcagcgccacggccaggccctgggggagctggcggagcagctggagcaggcccggaggggcaaaggtgcatgggagaagacccggctggccctggaggccgaggtgtccgagctgcgggcagaactgagcagcctgcagactgcacgtcaggagggtgagcagcggaggcgccgcctggagttacagctgcaggaggtgcagggccgggctggtgatggggagagggcacgagcggaggctgctgagaagctgcagcgagcccaggctgaactggagaatgtgtctggggcgctgaacgaggctgagtccaaaaccatccgtcttagcaaggagctgagcagcacagaagcccagctgcacgatgcccaggagctgctgcaggaggagaccagggcgaaattggccttggggtcccgggtgcgagccatggaggctgaggcagccgggctgcgtgagcagctggaggaggaggcagctgccagggaacgggcgggccgtgaactgcagactgcccaggcccagctttccgagtggcggcggcgccaggaggaggaggcaggggcactggaggcaggggaggaggcacggcgccgggcagcccgggaggccgaggccctgacccagcgcctggcagaaaagacagagaccgtggatcggctggagcggggccgccgccggctgcagcaggagctggacgacgccaccatggacctggagcagcagcggcagcttgtgagcaccctggagaagaagcagcgcaagtttgaccagcttctggcagaggagaaggcagctgtacttcgggcagtggaggaacgtgagcgggccgaggcagagggccgggagcgtgaggctcgggccctgtcactgacacgggcactggaggaggagcaggaggcacgtgaggagctggagcggcagaaccgggccctgcgggctgagctggaggcactgctgagcagcaaggatgacgtcggcaagagcgtgcatgagctggaacgagcctgccgggtagcagaacaggcagccaatgatctgcgagcacaggtgacagaactggaggatgagctgacagcggccgaggatgccaagctgcgtctggaggtgactgtgcaggctctcaagactcagcatgagcgtgacctgcagggccgtgatgaggctggtgaagagaggcggaggcagctggccaagcagctgagagatgcagaggtggagcgggatgaggagcggaagcagcgcactctggccgtggctgcccgcaagaagctggagggagagctggaggagctgaaggctcagatggcctctgccggccagggcaaggaggaggcggtgaagcagcttcgcaagatgcaggcccagatgaaggagctatggcgggaggtggaggagacacgcacctcccgggaggagatcttctcccagaatcgggaaagtgaaaagcgcctcaagggcctggaggctgaggtgctgcggctgcaggaggaactggccgcctcggaccgtgctcggcggcaggcccagcaggaccgggatgagatggcagatgaggtggccaatggtaaccttagcaaggcagccattctggaggagaagcgtcagctggaggggcgcctggggcagttggaggaagagctggaggaggagcagagcaactcggagctgctcaatgaccgctaccgcaagctgctcctgcaggtagagtcactgaccacagagctgtcagctgagcgcagtttctcagccaaggcagagagcgggcggcagcagctggaacggcagatccaggagctacggggacgcctgggtgaggaggatgctggggcccgtgcccgccacaagatgaccattgctgcccttgagtctaagttggcccaggctgaggagcagctagagcaagagaccagagagcgcatcctctctggaaagctggtgcgcagagctgagaagcggcttaaagaggtggtgctccaggtggaggaggagcggagggtggctgaccagctccgggaccagctggagaagggaaaccttcgagtcaagcagctgaagcggcagctggaggaggccgaggaggaggcatcccgggctcaggccggccgccggaggctgcagcgtgagctggaagatgtcacagagtcggccgagtccatgaaccgtgaagtgaccacactgaggaaccggcttcgacgcggccccctcaccttcaccacccgcacggtgcgccaggtcttccgactagaggagggcgtggcatccgacgaggaggcagaggaagcacagcctgggtctgggccatccccggagcctgaggggtccccaccagcccacccccagtgaccctaccctgtccccagatgcactaacagatggggcccagcccccttcctccctggaccccacgggcccctgtcccaggaaccccgccctctgacttcttgccctttggaaatggtgcagcactctggcatttatcacccccacctgggtcccctgcaacctcccatcaaaggatgacccctaaacacagaggagcggggcaggcagggaggcaatgactggagctaccttgcttgttgggggactgggtacagttggcaagctgtgtttccatcagctccctgtcctcctttcttccctcgttattgatctatagacattaggaagggagtgagacggctcctccaccatcctcagccagtgcaacccattccctctgcttctctctctctctctctctctccctccctctccttccctaccctctcaccatctttcttggcctctctgagggtctctctgtgcatctttttaggaatctcgctctcactctctacgtagccactctccttcccccatttctgcgtccacccctgaactcctgagcgacagaagccccaggcctccaccagccttgaacccttgcaaaggggcaggacaaggggacccctctcactcctgctgctgcccatgctctgccctcccttctggttgctctgagggttcggagcttccctctgggactaaaggagtgtcctttaccctcccagcctccaggctctggcagaaataaactccaacccgactggaccataaaaaaaaaaaaaaaaaa

SEQ ID NO: 86 - protein, 1995 aa, Homo sapiens
  MISC_FEATURE (1)..(1995): myosin, heavy chain 14 (MYH14), transcript variant 2
MAAVTMSVPGRKAPPRPGPVPEAAQPFLFTPRGPSAGGGPGSGTSPQVEWTARRLVWVPSELHGFEAAALRDEGEEEAEVELAESGRRLRLPRDQIQRMNPPKFSKAEDMAELTCLNEASVLHNLRERYYSGLIYTYSGLFCVVINPYKQLPIYTEAIVEMYRGKKRHEVPPHVYAVTEGAYRSMLQDREDQSILCTGESGAGKTENTKKVIQYLAHVASSPKGRKEPGVPGELERQLLQANPILEAFGNAKTVKNDNSSRFGKFIRINFDVAGYIVGANIETYLLEKSRAIRQAKDECSFHIFYQLLGGAGEQLKADLLLEPCSHYRFLTNGPSSSPGQERELFQETLESLRVLGFSHEEIISMLRMVSAVLQFGNIALKRERNTDQATMPDNTAAQKLCRLLGLGVTDFSRALLTPRIKVGRDYVQKAQTKEQADFALEALAKATYERLFRWLVLRLNRALDRSPRQGASFLGILDIAGFEIFQLNSFEQLCINYTNEKLQQLFNHTMFVLEQEEYQREGIPWTFLDFGLDLQPCIDLIERPANPPGLLALLDEECWFPKATDKSFVEKVAQEQGGHPKFQRPRHLRDQADFSVLHYAGKVDYKANEWLMKNMDPLNDNVAALLHQSTDRLTAEIWKDVEGIVGLEQVSSLGDGPPGGRPRRGMFRTVGQLYKESLSRLMATLSNTNPSFVRCIVPNHEKRAGKLEPRLVLDQLRCNGVLEGIRICRQGFPNRILFQEFRQRYEILTPNAIPKGFMDGKQACEKMIQALELDPNLYRVGQSKIFFRAGVLAQLEEERDLKVTDIIVSFQAAARGYLARRAFQKRQQQQSALRVMQRNCAAYLKLRHWQWWRLFTKVKPLLQVTRQDEVLQARAQELQKVQELQQQSAREVGELQGRVAQLEEERARLAEQLRAEAELCAEAEETRGRLAARKQELELVVSELEARVGEEEECSRQMQTEKKRLQQHIQELEAHLEAEEGARQKLQLEKVTTEAKMKKFEEDLLLLEDQNSKLSKERKLLEDRLAEFSSQAAEEEEKVKSLNKLRLKYEATIADMEDRLRKEEKGRQELEKLKRRLDGESSELQEQMVEQQQRAEELRAQLGRKEEELQAALARAEDEGGARAQLLKSLREAQAALAEAQEDLESERVARTKAEKQRRDLGEELEALRGELEDTLDSTNAQQELRSKREQEVTELKKTLEEETRIHEAAVQELRQRHGQALGELAEQLEQARRGKGAWEKTRLALEAEVSELRAELSSLQTARQEGEQRRRRLELQLQEVQGRAGDGERARAEAAEKLQRAQAELENVSGALNEAESKTIRLSKELSSTEAQLHDAQELLQEETRAKLALGSRVRAMEAEAAGLREQLEEEAAARERAGRELQTAQAQLSEWRRRQEEEAGALEAGEEARRRAAREAEALTQRLAEKTETVDRLERGRRRLQQELDDATMDLEQQRQLVSTLEKKQRKFDQLLAEEKAAVLRAVEERERAEAEGREREARALSLTRALEEEQEAREELERQNRALRAELEALLSSKDDVGKSVHELERACRVAEQAANDLRAQVTELEDELTAAEDAKLRLEVTVQALKTQHERDLQGRDEAGEERRRQLAKQLRDAEVERDEERKQRTLAVAARKKLEGELEELKAQMASAGQGKEEAVKQLRKMQAQMKELWREVEETRTSREEIFSQNRESEKRLKGLEAEVLRLQEELAASDRARRQAQQDRDEMADEVANGNLSKAAILEEKRQLEGRLGQLEEELEEEQSNSELLNDRYRKLLLQVESLTTELSAERSFSAKAESGRQQLERQIQELRGRLGEEDAGARARHKMTIAALESKLAQAEEQLEQETRERILSGKLVRRAEKRLKEVVLQVEEERRVADQLRDQLEKGNLRVKQLKRQLEEAEEEASRAQAGRRRLQRELEDVTESAESMNREVTTLRNRLRRGPLTFTTRTVRQVFRLEEGVASDEEAEEAQPGSGPSPEPEGSPPAHPQ

SEQ ID NO: 87 - DNA, 7074 bp, Homo sapiens
  misc_feature (1)..(7074): myosin, heavy chain 15 (MYH15)
catttctacttcatatgatcattttaattgtatttacctcatcttaccaaaaagatcatggttgaatcttgcctactcacgtttagggcctttttttggtggattgctttaataaagatggatctgtcagaccttggagaagccgcagccttcctcagaagaagtgaagctgagctgcttctactacaggccacagccttggatgggaagaagaaatgctggattcctgatggtgagaatgcttatatcgaggctgaggtaaaagggagtgaagatgatggaacagtaattgttgagacagcagatggagagagtctgagcataaaggaggacaaaatccagcagatgaatcctccagagtttgaaatgattgaagacatggcaatgctgactcacctcaatgaggcatccgtgctgcataccctgaagcggcgctatggccagtggatgatctatacatattcaggtctcttctgtgtgaccataaacccttacaaatggcttcccgtgtatcagaaagaagtcatggccgcctacaaagggaagaggcgatcagaggctccccctcacatctttgctgttgccaataacgcctttcaggacatgcttcacaatcgagaaaatcagtctatactcttcacaggagaatctggtgctggaaagactgtgaacagcaaacatattatccagtattttgccaccatagcagccatgattgaatccaggaaaaagcagggggcgttagaagatcaaatcatgcaagcgaatactatcttggaagcatttggaaatgctaaaaccctgagaaatgacaactcctctcgttttggcaaattcatcaggatgcactttggtgccagaggcatgctgtcatctgtggacattgatatctatttgcttgaaaagtccagggtgattttccagcaggctggagagaggaactaccacatattctatcaaattctatctggacaaaaagagcttcatgacctgctcctggtatctgcaaatccctcagacttccacttttgctcctgtggagcagttactgtggagagcttggatgatgctgaagaattgctggccacagaacaagccatggacatcttgggctttcttcctgatgagaagtatggatgctataaactcactggagccatcatgcactttggaaatatgaaatttaaacagaaacctagagaagagcaactggaagcagatggcacagaaaatgctgacaaagctgctttcctcatgggcattaactcctctgagttggtaaagtgcttgatccatcctagaatcaaagttggtaacgaatatgttaccagaggtcaaactatagaacaggtaacctgtgctgtcggtgccctgtccaagtcaatgtatgaaaggatgtttaagtggctagtggcacggatcaacagggccctggatgccaagctgtcaaggcagttcttcattggcattcttgacatcactggttttgaaatccttgagtataatagccttgagcaactttgcattaattttaccaatgaaaaattacaacaattcttcaattggcacatgtttgttctggagcaagaggaatataagaaagaaagcattgaatgggtgtctattggctttggtctggatttgcaagcttgcatagatctcattgagaagccaatgggcatcctttccatccttgaagaagagtgtatgtttcctaaggctacagacctgactttcaagaccaaactctttgacaaccattttggaaagtcggttcatctccagaagcccaagcctgataagaagaaatttgaagctcattttgaacttgtccattatgcaggagtggtaccttataatatcagtggttggctggaaaagaacaaagacctccttaatgaaacagtggtagctgtatttcagaagtcttccaacagactcctggcgagcctttttgaaaattacatgagtactgacagtgctataccatttggggagaagaaacgaaagaaaggagcttcattccaaacggttgcatctctgcataaagaaaacctgaataaattgatgactaatctgaaatcaacagcacctcattttgtgagatgcataaatcccaatgtgaacaaaataccaggtatactggacccttacttggttctacagcagttgcgctgtaatggtgtcttggaagggactaggatatgccgtgaaggttttccaaaccgactgcagtatgctgattttaaacaaaggtactgcattctgaatccaaggacctttccaaagagcaagtttgtgagcagcagaaaagcagctgaagaattacttggctccttggagatagaccatacccagtaccgatttggaatcactaaggtgttttttaaagctgggtttctgggccaactggaagcaataagagatgagagactatctaaagtcttcacattgttccaagccagagcacagggcaaactgatgcgaatcaaattccagaagattctggaagaaagggatgcacttattttgatccaatggaacataagagctttcatggctgtgaagaactggccctggatgaggctcttcttcaagatcaagcctcttgttaaatcttcagaagtaggagaagaagtagctggactgaaggaagagtgtgcacaattacagaaagccttggagaaatcagagtttcagagggaggaactgaaagcaaagcaagtatccctcactcaggaaaaaaatgacctgattcttcagcttcaggctgagcaagagacactggcaaatgttgaagagcagtgcgagtggctgattaaatccaagatccagctggaggccagagtaaaggagctgtcggagagggtggaggaagaagaggagataaattctgagctgactgccagggggcggaaactcgaagatgaatgttttgagttgaagaaagaaatcgatgacctggaaacaatgttggtgaagtcagagaaggagaagcgtactacagagcacaaggtcaagaacttgactgaggaagtagagtttctaaatgaggatatcagcaaacttaacagagcagccaaggttgtgcaggaggcccatcagcagaccctggatgacctgcacatggaggaggagaagctcagcagcctgagcaaagcaaatctgaagctggaacagcaagttgatgagcttgagggtgcccttgagcaggagagaaaagcgagaatgaactgtgaaagggaactgcacaaactggagggcaatttaaagctgaatcgggaaagtatggagaacctggaaagcagccagcgacacctggcagaagagctgaggaaaaaagaattagaattgagtcagatgaattcaaaagtggagaatgagaaaggcctggtagctcagcttcagaagacggttaaagagcttcagactcaaataaaggatttgaaagagaaactagaagctgaaaggaccactcgagccaagatggaaagggagagagctgacctcacccaagacctggctgacttgaatgagaggctggaggaggtaggaggatccagtttggctcagctggaaataactaagaaacaggaaaccaaattccagaagctgcaccgagacatggaagaggccactctgcactttgagacaacttctgcatctttgaagaagagacatgcagacagcctggctgagctcgagggccaggtagaaaatctacagcaggtcaagcagaaactggaaaaagacaagagtgacttgcagctagaagtagatgacctcctgacccgtgttgagcagatgacaagagctaaggcaaatgctgagaaactctgtactctatatgaagagcgcttgcatgaagcaactgcaaagctagataaggtgactcagttggcaaatgacctggcagcacaaaagacaaagctgtggagtgagagtggcgagttcctacggaggcttgaagagaaggaggctctgataaaccaactttccagggaaaagagcaacttcactcggcagattgaagacctgagagggcagctggaaaaggagaccaaatcccagagtgccctggcccatgccctgcagaaggctcagcgtgactgtgaccttctacgagagcagtatgaggaagaacaagaggtcaaggctgagctgcaccggaccttatccaaagtcaatgctgaaatggtgcaatggagaatgaagtatgaaaacaatgtcatccagagaacagaagacttggaggatgccaagaaggaactggcaattagattgcaggaggcagccgaagccatgggggtggccaatgccagaaatgcctccttggagagagccaggcaccagctgcagctggagctcggggacgccctgtctgacctcgggaaggtccgctctgcagcagccaggctggaccagaagcagctgcagtctggcaaggcccttgccgactggaagcagaagcacgaggagtcccaggcgttgctggatgcctctcagaaggaagttcaggctctcagtacagagctcctcaagctcaagaacacctatgaggagagcatcgtgggccaggagacactcaggagggagaacaagaacctccaagaagagatttctaatctgacaaaccaggttagagaagggaccaagaacttaactgaaatggaaaaggtcaagaaactaattgaagaagagaagacagaagtccaggtgacactggaagaaacagagggagccctggaacgtaatgaaagcaagattcttcatttccagcttgaactcttggaagctaaagcagaacttgaaagaaagctttcagagaaagatgaagaaatagaaaattttaggaggaagcagcagtgtaccattgactccctgcagtctagtctggattctgaagctaagagcagaattgaggttacccggctgaagaagaagatggaagaggacctcaatgagatggaactccagcttagctgtgccaaccggcaggtgtcagaagcaaccaaatccctgggccagcttcagattcaaatcaaggaccttcaaatgcagctggatgacagcacacaactgaacagtgatctgaaggagcaggtggctgtggctgagcggcgcaactctcttcttcagtctgaactagaggatctaaggtccctgcaagagcagacagagcgtggccgcaggctgtcagaagaagagctcctggaagcaacagaaagaatcaatcttttctatacccagaacacaagcctcctcagccagaagaagaaactggaggctgatgttgcccggatgcagaaagaagctgaagaggtggtgcaggagtgtcaaaatgcagaagagaaggccaagaaggcagccattgaggcagcaaacttgtcagaagaactgaagaagaagcaagacaccattgcccacttggaaaggacaagagaaaatatggagcagacaattacagacttacagaaaaggctggctgaagctgaacagatggccctgatggggagtagaaagcaaatccagaaactagaatccagggttcgtgaactggaaggtgaactggagggtgaaatccgtcgcagtgcagaggcccagaggggagcccgcagacttgagcgatgcatcaaagagctgacctatcaggcagaggaagacaagaagaatctgagcaggatgcaaactcagatggataaacttcagctaaaagtgcaaaattacaagcagcaagtcgaggtggcggaaacacaagccaatcaatacctttccaagtataagaaacagcaacatgagttgaatgaagtgaaggaaagggcagaggtggcagaatctcaagtcaataaactcaaaattaaagcaagagagtttgggaaaaaggttcaagaagaatagcatcccctgctttgaaaggacaacagctggagaagtacaaggaaggtgctgtttcatggccaaaaacttaggttgcatggaaacatttttaaaaacatgtttaaattgcttttcacaccatataaacaaggcaattagaaaaataattaaagggaatatcattgcttccacagttaatggggattttttgatcctcaaatgcaagtaaactaccttctaatgcttcacatgacagattaaataaatggaagaaccttttcaattctgatgtttaaaaaatgaataaatacttgatcctttgtccatatttcctcttaatgggtaggactcatagaagatgtccttagaccagtcacgcttcatggggactagggcatgttggtgaatggtttttactaaagttaggcaactttggcttgattcacccctaaatctatgaatgtatattgtgagccagcagtggtagaatggaagtcataagatctcctcagcattgtgatataaatatagctatagttaggcaatttgaacatgtaggcaaaactctcctaatcaacacacatgtaggctatatgctggtacatgctttaaacatggaggtaaccccacacgagacattcagtgacaggtaatatgctggatttgtgcagtaccgatttggctcagctggaggaacatgtcccggaattcctctctctcatggttctggattggagtaggtcataaagaaatttgcattaatttgatcagcagctattttatactcataaggtcagtgtacagacccaagcatggtgacagcttgaaaatatgactccaggccaaaaaggggagctagaagagaccagagacagctccctggacccagagctcttccagctcctgccagcctcctccttcagctttgcaaagtactggccaggtgtgtgtgcagctccatggcaaccagcatcagcttttcctgagatcacacacagcattgcagtggaggccgtgagacagacatgggttctgtttgttcttatggacttcccttcatccttgctgcattcacagtcgacctacagtgacttcaggcccagaaccagatgcagagggaacagcctggcctagacttctccaccagcacccacaattgtgtaaggctgaagctctataataaatctttattctgtc

SEQ ID NO: 88 - protein, 1946 aa, Homo sapiens
  MISC_FEATURE (1)..(1946): myosin, heavy chain 15 (MYH15)
MVESCLLTFRAFFWWIALIKMDLSDLGEAAAFLRRSEAELLLLQATALDGKKKCWIPDGENAYIEAEVKGSEDDGTVIVETADGESLSIKEDKIQQMNPPEFEMIEDMAMLTHLNEASVLHTLKRRYGQWMIYTYSGLFCVTINPYKWLPVYQKEVMAAYKGKRRSEAPPHIFAVANNAFQDMLHNRENQSILFTGESGAGKTVNSKHIIQYFATIAAMIESRKKQGALEDQIMQANTILEAFGNAKTLRNDNSSRFGKFIRMHFGARGMLSSVDIDIYLLEKSRVIFQQAGERNYHIFYQILSGQKELHDLLLVSANPSDFHFCSCGAVTVESLDDAEELLATEQAMDILGFLPDEKYGCYKLTGAIMHFGNMKFKQKPREEQLEADGTENADKAAFLMGINSSELVKCLIHPRIKVGNEYVTRGQTIEQVTCAVGALSKSMYERMFKWLVARINRALDAKLSRQFFIGILDITGFEILEYNSLEQLCINFTNEKLQQFFNWHMFVLEQEEYKKESIEWVSIGFGLDLQACIDLIEKPMGILSILEEECMFPKATDLTFKTKLFDNHFGKSVHLQKPKPDKKKFEAHFELVHYAGVVPYNISGWLEKNKDLLNETVVAVFQKSSNRLLASLFENYMSTDSAIPFGEKKRKKGASFQTVASLHKENLNKLMTNLKSTAPHFVRCINPNVNKIPGILDPYLVLQQLRCNGVLEGTRICREGFPNRLQYADFKQRYCILNPRTFPKSKFVSSRKAAEELLGSLEIDHTQYRFGITKVFFKAGFLGQLEAIRDERLSKVFTLFQARAQGKLMRIKFQKILEERDALILIQWNIRAFMAVKNWPWMRLFFKIKPLVKSSEVGEEVAGLKEECAQLQKALEKSEFQREELKAKQVSLTQEKNDLILQLQAEQETLANVEEQCEWLIKSKIQLEARVKELSERVEEEEEINSELTARGRKLEDECFELKKEIDDLETMLVKSEKEKRTTEHKVKNLTEEVEFLNEDISKLNRAAKVVQEAHQQTLDDLHMEEEKLSSLSKANLKLEQQVDELEGALEQERKARMNCERELHKLEGNLKLNRESMENLESSQRHLAEELRKKELELSQMNSKVENEKGLVAQLQKTVKELQTQIKDLKEKLEAERTTRAKMERERADLTQDLADLNERLEEVGGSSLAQLEITKKQETKFQKLHRDMEEATLHFETTSASLKKRHADSLAELEGQVENLQQVKQKLEKDKSDLQLEVDDLLTRVEQMTRAKANAEKLCTLYEERLHEATAKLDKVTQLANDLAAQKTKLWSESGEFLRRLEEKEALINQLSREKSNFTRQIEDLRGQLEKETKSQSALAHALQKAQRDCDLLREQYEEEQEVKAELHRTLSKVNAEMVQWRMKYENNVIQRTEDLEDAKKELAIRLQEAAEAMGVANARNASLERARHQLQLELGDALSDLGKVRSAAARLDQKQLQSGKALADWKQKHEESQALLDASQKEVQALSTELLKLKNTYEESIVGQETLRRENKNLQEEISNLTNQVREGTKNLTEMEKVKKLIEEEKTEVQVTLEETEGALERNESKILHFQLELLEAKAELERKLSEKDEEIENFRRKQQCTIDSLQSSLDSEAKSRIEVTRLKKKMEEDLNEMELQLSCANRQVSEATKSLGQLQIQIKDLQMQLDDSTQLNSDLKEQVAVAERRNSLLQSELEDLRSLQEQTERGRRLSEEELLEATERINLFYTQNTSLLSQKKKLEADVARMQKEAEEVVQECQNAEEKAKKAAIEAANLSEELKKKQDTIAHLERTRENMEQTITDLQKRLAEAEQMALMGSRKQIQKLESRVRELEGELEGEIRRSAEAQRGARRLERCIKELTYQAEEDKKNLSRMQTQMDKLQLKVQNYKQQVEVAETQANQYLSKYKKQQHELNEVKERAEVAESQVNKLKIKAREFGKKVQEE

SEQ ID NO: 89 - DNA, 11876 bp, Homo sapiens
  misc_feature (1)..(11876): unconventional myosin-15
gggctgggcctcccttccccataacactgagctgctctgctgggccaaccgtgctcctgggccagccagaggacccccatgaggcggcatgcaggcggggagcaggccacagaacgcagggtgaaacccaaggcgctctagaggagatgaattatggatccgccctcccggaatcctggctcggccctccccacgccacccagggccagtcgggtctgctcacagcccgaggaggccgcgtgtccagccgcgggcaagagaccgagcaggtccctgtgtctccaagtccctgagcccgtgacaccggccccaggccctgtagagagcaggcagccaccatggcgaaggaggaagatgaggagaagaaagccaagaaagggaagaaggggaagaaggcaccggagccggagaagcccaaacggagcctgaaggggacgtcgcggctgttcatgggcttccgcgaccgtacacccaagatctccaagaagggccagttccgcagcgcctcggccttcttctggggcctccacaccggcccccagaagaccaagcgcaagaggaaggcccgcaccgtgctcaagtccacgtcaaagctcatgacgcagatgcgcatgggcaagaagaagcgggcgatgaagggcaagaagccgtccttcatggtgatccgcttcccaggccgccgtggctacggccgcctgcggccgcgcgcccggtcactcagcaaagcgtccacggccatcaactggctcacaaaaaagttcctcctcaagaaggccgaggagtcgggcagcgaacaggccacagtggacgcctggctgcagcgctcgagctcccgcatgggctcccgcaaactccccttcccgtcgggtgccgagatcctgcggcctgggggccggctccggaggttcccccgcagccgcagcatctacgcgtcaggcgagcccctgggcttcctgcccttcgaggacgaggccccattccatcactcgggctcccgcaagtcgctgtacgggcttgagggcttccaggacctgggcgagtattatgactatcaccgcgacggcgacgactactacgaccggcagtcactccaccgctacgaggagcaggaaccctacctggcgggcctcggcccctacagcccggcctggccaccctacggcgaccactactacgggtacccgcccgaggatccctacgactactaccaccccgactattacggtggcccctttgatccggggtacacctacggctacggctacgacgattacgaacccccatatgcgcccccgtcggggtactcgtctccttacagctaccacgatgggtacgagggcgaggcgcacccttatggctactacctggatccctatgcgccgtacgacgcgccatacccaccctatgacctcccataccacactccctacgatgtaccctactttgatccctacggagtccactacaccgtcccctatgccgaaggcgtctatggcggtggggacgaggccatctacccccccgaggtgccctatttttacccggaggagtcggcttcggcctttgtgtacccctgggtaccaccgcccatcccgtcgccccacaacccgtatgcccacgccatggatgacatcgccgagctggaggaaccagaggacgcgggcgtagagcgtcaggggacctccttccgcctgcccagcgccgccttcttcgagcagcaaggcatggataagcccgccaggtccaagctgtccctcatccgcaagttccgcctcttcccgcgaccccaggtgaagctgtttgggaaggagaagctggaggtgcccctgccaccctctctggacattcctctccccttgggggatgcggacgaagaagaggacgaggaggagctgcccccggtttccgctgtgccctacggccaccctttctggggcttcctcacgccgcgccagcgcaacctccagcgcgcgctgtcggccttcggcgcccaccggggcctgggcttcggccctgagtttggccgccccgtgcctcgccctgccacctcgcttgcgcggttcctcaagaagacgctgtcggagaagaagcccatcgcgcggctcaggggcagccagaagacccgggcgggcggccctgctgtcagggaggcggcctacaaacgcttcggctacaagctggctggcatggaccccgagaagcccggcacgcccatcgtgctgaggagggcccagccgcgcgctcgcagcagcaacgacgcgcgccgcccgcccgcgccacagcccgcgcccaggaccctctcccactggagcgcgctcctgtctccgcccgtgcccccgcggcccccaagctccgggcccccgcccgcgccgccgctctccccggcgctctcgggcctgccccggccggcctcgccctacggctccctccgccgccacccgccgccctgggccgccccagcgcacgtgccaccggcgccgcaggccagcgggtgggccttcgtggagccccctgccgtgagcccggaggtgccccccgacctactagccttcccagggccccgaccctcgttcaggggctcccgccggagaggggcggctttcggcttccccggggcctctccacgggcgtcgcggaggcgagcttggtcaccgctggcctcgccccagccctcgctgaggagctcgccgggcctcggctactgctcacccttggcgcccccgtcgcctcagctgtccttgcgcacgggccccttccagccgcccttcctgcccccggcccgccggccccgctcgctgcaggagtccccagccccacgccgagccgctgggcgcctgggcccacccggctcgccgctgccgggctcacccaggccgccctcgccgcccctggggctctgccacagcccgcggcgcagctccctgaatctgccctcgcgcctcccgcacacgtggcggcgcctcagcgagccacccactcgggctgtgaagccgcaagtgcgcctgcccttccaccgaccgcccagggccggggcctggcgggcgcccctggaacaccgggagagcccgcgagaacccgaggactcagagacgccctggactgtgcccccactggcccccagctgggacgtggacatgcctcccacccaacgcccaccctccccctggccaggaggtgcaggcagccgccgaggcttttccaggccaccccctgtgccggaaaacccctttctccagctcctgggccctgtgccatcccccaccctccagcctgaggatccagctgctgatatgaccagggtcttcctgggcagacaccatgagccggggcctggacagctcaccaaatcagctggcccaacccctgagaagcctgaagaagaggccaccctgggggacccccagctgccagcagagaccaagcctccaaccccagcacctcccaaggatgtcactccccccaaggatatcactccccccaaggatgtcctcccagagcaaaagacattaaggcccagcctctcatacccactggctgcgtgtgaccagaccagggccacatggccaccatggcaccgctggggaacactgccccaagccgcagcccccttggcgcccatcagggccccagagcccctgcccaaggggggtgaacggcgccaggcagcccctgggcgttttgctgtggtcatgcctcgtgtgcagaagctgagctctttccagcgagttgggcctgcaaccctgaagcctcaagtccagcccattcaggaccccaagccaagagcctgtagtcttcgctggtcctgcctctggcttcgggcagatgcctatggaccctggccacgagtacacacccatccccagtcctgccacctgggccctggagctgcctgcctgtcccttaggggctcctgggaggaggtcggcccgccaagctggcggaacaagatgcactccatccgcaacctgccatccatgcggttccgtgagcagcacggggaggatggtgtggaggacatgacacagctggaagacctccaggaaaccactgtgctgtccaacctcaagattagatttgaacggaacctcatctacacatacattgggagcatcctggtgtcggtgaacccataccaaatgtttggaatctatgggccggagcaggtgcagcagtacaacggacgggccctgggagagaatcccccgcacctctttgctgttgcaaatctcgccttcgccaaaatgctcgatgccaaacagaaccagtgcataatcattagtggagagagcggctctggcaaaactgaggccaccaagctgattctgcgctacctggccgccatgaaccagaaacgggaggtcatgcagcagataaagatcctggaggcaacacccctcttggagtccttcggtaatgccaaaaccgtcaggaacgacaactccagccgctttgggaagtttgtggaaatctttctggaagggggcgtgatctctggtgccataacctcccagtacctgcttgagaaatccaggatcgtgtttcaggccaaaaacgagaggaattaccacatcttctacgagttgctggccgggttgcctgcccagctcaggcaggcctttagcctgcaagaggctgagacctactactatctgaaccagggtgggaactgtgagatagcaggaaagagcgatgcagatgactttcgccggctcctggctgccatggaggtgttgggcttcagcagtgaggaccaggacagcatcttccgcatcctggcctccatcctgcacctgggcaacgtctactttgagaagtatgagacggatgcacaggaggtggcctcagtggtgagtgcccgagagatccaggccgtggcagagctgctgcagatctcccctgagggcctgcagaaggccatcaccttcaaagtgaccgagacaatgcgagagaagatcttcacgcccctaactgtggagagcgctgtggatgccagggacgccatcgccaaggtcttgtatgcactgctgttcagctggctcatcaccagggtcaacgcgctggtgtccccaaggcaggacacactgtccatcgccatcctggacatctatggtttcgaggacctgagcttcaacagctttgagcagctgtgtattaactacgcaaacgagaaccttcagtaccttttcaacaagatcgtcttccaggaggagcaggaggagtacatccgtgagcagatagactggcaggagatcacctttgctgacaaccagccccgcatcaacctcatctcactgaagccttatggcatcctgcggatccttgacgaccagtgttgctttccccaggctacagaccacaccttcctacagaagtgccactaccatcatggcgccaacccgctctattccaaacccaagatgccgctgcctgagttcaccatcaagcactatgcaggcaaggtcacctaccaggtgcacaagttcctggacaagaaccacgaccaagtgcgccaggatgtgctggacctgttcgtacggagccggacacgggtggtggcacacctcttctccagccatgccccacaggctgcccctcagcgcctgggcaagagcagctccgtcactcggctctacaaggcgcacactgtggccgccaagttccagcagtcactcctggatctggtggaaaagatggagaggtgcaaccccttgttcatgcgttgcctgaagcccaaccacaagaaggagccaggtctctttgagccagatgtggtaatggcacaattacgctattcaggggtgctggagaccgtgaggatccgcaaggagggatttccagtgcgcctgcctttccaggggttcatcgacaggtactgctgtctagtggccctcaagcatgacctgccggctaatggggacatgtgtgtgtcagtgctgagtcgcctgtgcaaagtcatgccaaacatgtaccgtgttggggtcagcaagctgttccttaaggaacacctataccagctgctggagagtatgcgagagcatgtcctgaatctggcagccctcactctgcagcgctgcctccgtggcttcttcattaagcggcgattccgctctctgcgccacaagatcatcctgctgcaaagccgggcccgtggctaccttgccaggcaacgctatcagcagatgaggaggagtctggtgaagttccggtccctggtacacgcatacgtgagccgccgacgctatctcaagctgagggcagagtggaggtgccaggtggagggggcgctgctgtgggagcaggaggagctgagcaagcgggaggtagtcgctgtggggcacctggaggtaccggctgagctggctgggctcttgcaagcagtggcaggcctcgggctggcccaggtgcctcaggtggcccctgtgaggactcctcgactccaggctgagccccgtgtcacactgcccctggacatcaacaactatcctatggccaagtttgtccagtgccacttcaaggaacctgcctttgggatgctgacagtgcccctgaggacacccctcacgcagctgccagccgagcaccatgcagaagccgtgagcatcttcaagctgatcctgcgcttcatgggcgacccccacctgcatggtgcccgggagaacatcttcgggaactacatcgtgcagaaggggctggcggtgcctgagctgcgggatgagatcctggcacagctggccaatcaggtgtggcacaatcacaatgcccacaatgctgagcggggctggctgctgctggccgcctgcctcagtggctttgcaccttccccgtgcttcaacaagtaccttctcaagtttgtgtctgattatgggcggaatggcttccaggctgtgtgtcagcaccgcctcatgcaggccatgggccgggcccaacagcagggctcgggggctgcccgcaccttacccccgacccagctcgagtggacagcgacctatgagaaggccagcatggcgctggacgtgggctgcttcaatggtgaccagttctcctgcccggtgcactcctggagtacgggggaagaggtggctggagacattctgaggcacagggggctggcagatggctggcgcggctggaccgtggccatgaagaatggtgtccagtgggcagagctggctggccacgactacgtgttagacctggtgtcggacctggagctgctcagggacttccctcgacagaagtcctacttcattgtgggcacagaggggcctgcagccagcaggggaggccccaaagtggtgtttgggaacagctgggactcggatgaggacatgtccactagaccccagccccaggagcacatgcccaaagtacttgactctgatgggtacagcagccacaatcaggacggtacaaatggggagactgaggcccaaagagggacagcaacccaccaagagtcagacagtcttggagagcctgctgtgccccacaaggggctggactgctacctggatagcctcttcgaccctgtgctgtcctacggggatgcggacctggagaagccaacagccattgcctaccgcatgaaagggggaggccagcccggtggaggcagcagtagtggtactgaagacacccccaggagacccccagagccaaagccaatcccaggcctggatgcctccacattggctctgcagcaagccttcatccacaaacaggccgtgctgctggcccgggggatgaccctgcaggccacggcactccagcagcaacccctgagtgctgccctgagatccttgcccgcagagaaacccccagcaccagaggcacagccgacgtctgtgggcaccggtccccctgccaaacccgtgctcctgcgtgccactccaaagcccttggccccagcccctctggccaaggctccaaggctccccatcaagcctgtggctgcccctgttctagctcaggatcaggcttctccagaaaccacttcaccctccccagagctggtccggtactctacgctcaactctgagcacttcccacagcccacacagcagatcaagaatattgtcaggcagtaccagcagccgttccggggaggccggcctgaggccctcaggaaggatggcgggaaagtgttcatgaagcggccagaccctcatgaggaggccctgatgatcctgaaagggcagatgacccacctggcagctgcacctggcacccaggtgtccagagaggccgtggccctggtgaagccggtgaccagtgcaccaaggccatccatggcacccacttcagctctgccctcgcgatcgctggagccccctgaggaactcacgcagacgcggctgcaccgcctcatcaatcccaacttctacggctatcaggacgccccctggaagatcttcctgcgcaaagaggtgttttaccccaaggacagctacagccatcctgtgcagcttgacctcctgttccggcagatcctgcacgacacgctctccgaggcctgccttcgcatctctgaggatgagaggctcaggatgaaggccttgtttgcccagaaccagctggacacacagaagcctctggtaacggaaagcgtgaagcgggccgtggtcagcactgcacgagacacctgggaggtctacttctcccgcatcttccccgccacgggcagcgtgggcactggtgtgcagctcctagctgtgtcccacgtgggcatcaaactcctgaggatggtcaagggtggccaggaggccggcgggcagctgcgggtcctgcgtgcatacagctttgcagatatcctgtttgtgaccatgccctcccagaacatgctggagttcaacctggccagtgagaaggtcatcctcttctcagcccgagcgcaccaggtcaagaccctggtagatgacttcatcttggagctgaagaaggactctgactacgtggtcgctgtgaggaacttcctgcctgaggaccctgcgctgctggctttccacaagggtgacatcatacacctgcagcccctagagccacctcgagtgggctacagtgctggctgcgtggttcgcaggaaggtggtgtacctggaggagctgcgacgtagaggccccgactttggctggaggttcgggaccatccacgggcgcgtgggccgcttcccttcggagctggtgcagcccgctgctgcccccgacttcctgcagctgccaacggagccaggccgcggccgagcagccgccgtggccgctgctgtggcctctgcagccgctgcacaggaggtgggccgcaggagagagggtcccccagtcagggcccgctctgctgaccatggggaggacgccctggcgctcccaccctacacaatgctcgagtttgcccagaagtatttccgagaccctcagaggagaccccaggatggcctcaggctgaaatccaaggagcctcgggagtccagaaccttggaggacatgctttgcttcaccaagactcccctccaggaatccctcatcgaactcagcgacagcagcctcagcaagatggccaccgacatgttcctagctgtaatgaggttcatgggggatgccccactgaagggccagagtgacctggacgtgctttgtaacctcctgaagctgtgcggggaccatgaggtcatgcgggatgaatgttactgccaagttgtgaagcagatcacagacaataccagctccaagcaggacagctgccagcgaggctggaggctgctgtatatcgtgaccgcctaccacagctgctctgaggtcctccacccacacctcactcgcttcctccaagacgtgagccggaccccaggcctgccctttcaggggatcgccaaggcctgcgagcagaacctgcagaaaaccttgcgcttcggaggtcgtctggagctccccagcagcatagagcttcgggccatgttggcaggccgcagttccaagaggcaactctttcttcttcctggaggccttgaacgccatctcaaaatcaaaacatgcactgtggccctggacgtggtggaagagatatgtgctgagatggctctgacacgccctgaggccttcaatgaatatgttatcttcgttgtcaccaaccgtggccagcatgtgtgcccactcagtcgccgtgcttacatcctggatgtggcctcagagatggagcaggtggacggcggctacatgctctggttccggcgtgtgctctgggatcagccactcaagttcgagaatgagctatatgtgaccatgcactacaaccaggtcctgcctgactacctgaagggactcttcagcagtgtgccggccagccggcccagcgagcagctgctgcagcaggtgtccaagctggcttcactgcagcatcgcgccaaggaccacttctacctgccgagcgtgcgggaagtccaggagtacatcccagcccagctctaccgtacaacggcaggctcgacctggctcaacctggtcagccagcaccggcagcagacacaggcgctcagcccccaccaggcccgtgcccagtttctgggcctcctcagcgccttacctatgttcggctcctccttcttcttcatccagagctgcagcaacattgctgtgccagccccttgcatccttgccatcaaccacaatggcctcaactttctcagcacagagactcatgaattgatggtgaagttccccctgaaggagatccagtcgacgcggacccagcggcccacggccaactccagctacccctatgtggagattgcgctgggggacgtggcggcccagcgcaccttgcagctgcagctggagcagggactggaactgtgtcgtgtggtggccgtgcacgtggagaacctgctcagtgcccatgagaagcggctcacattgccccccagcgagatcaccctgctctgacccagcccccagccctccagtaccttctgccagaagactcactgtgtggcctcagagaaatcactgaacctctcaggatcaatgacccctgtaaggggccagagccttggaggacactaagaggaggcaggaggagcaactcaaatccccaagaacacaagaagacccatcctgaactgggatggaatggcagcatgcaaacttggatcagatagcaggaggaactttcaaaagtctggcccactgtgcagtggagcagaaggcaggaccatgaggcctcctgccatgtacccattgcagaccctgcccctaactcctgcctatgacacagaagccccacaccagttgcccagatgaactggcctctgcctttggtttactcagggtctgatgttggaatctgctccaactccacaccctagcccttacatgtcctcctaaggggcccctccttgtgctgccagtcagcctggatttctggtctttggttatttctgtgcaaacaaaaggtgtgcctggcagccatttctccatggagttgctaagtggccggaaaacaggcctgagggaggaggcaggagttggagttaccttaggcccctgattcactggctatgaacagaccatcccccactccttgggtatccccaaccccagacccccatcacttgatgggccacacaagtttgagagtggtacaagggagaagtttgggaaaagccttcttggaaaatgggacattagcattgagttttgaaagatgagtaggagtttgctaagaatagatggaagacagcaggataaacattccagagaaaatcatgtttattccctgctgtatcttccagaacctaggaggatgcctaacagagagtaagcacttaaaaaatatttgtcatatgaatgaaaaaataaacgagtgaatgttgataaaaaaaaaaaaaa

SEQ ID NO: 90 - protein, 3530 aa, Homo sapiens [sequence omitted]

SEQ ID NO: 91 - DNA, 3652 bp, Toxoplasma gondii
  misc_feature (1)..(3652): MyoA
ttcggcacgaggaaaaaagaagttttctctccttcgttgtacctctttcctcgtgttatctctctctgaagcaaaatggcgagcaagaccacgtctgaggagctgaaaacggccacggcgctgaagaagaggtcgtccgatgtccacgcggtcgaccactccggcaatgtgtacaaaggatttcaaatctggacggacttggcgccgtcggtgaaggaggagccggacctgatgtttgccaagtgcatcgtgcaggcggggacagacaaggggaacttgacctgcgtccagatcgatccaccgggcttcgacgaaccgttcgaagtcccgcaggcgaatgcgtggaacgtaaacagcctgatcgaccccatgacgtacggagacatcggcatgttgcctcacacgaacattccttgcgtcctcgacttcctcaaggtgcgcttcatgaagaatcaaatctacacgactgcggacccgctcgtcgtcgccatcaatcccttccgcgacctcgggaacaccacgctcgactggattgttcgatacagagacactttcgacctctccaaactcgcgccccatgttttctacaccgcccgacgcgcgctcgacaacctccacgccgtcaacaagtcgcaaacgatcatcgtgtccggtgagtctggcgcgggcaagacggaggcgacgaagcagattatgaggtattttgcggcggcgaagacggggtcgatggatttgcggattcagaacgcgatcatggcggcgaatccagtgcttgaggcatttggaaatgcgaagacgattcgcaacaacaactcgtcgcgtttcggacgcttcatgcagctggatgtgggtcgcgaaggaggcatcaagtttggctccgtcgtcgcctttctcctggaaaagtcgcgtgttctcacgcaggacgaacaggagcggtcgtaccacatcttctaccaaatgtgcaagggggcggacgcggcgatgaaggagcgcttccatatcctgccgctctcggagtacaagtacatcaatccgttgtgcctggacgcgccagggatcgacgacgtcgcggagttccacgaagtctgcgagtcgttccggtcgatgaatctgacggaggacgaagtcgcgagcgtgtggagcatcgtgagtggagtgctgctgcttggcaacgtcgaggtgacagcgacgaaggatggggggatcgacgacgccgcggcgatcgaggggaagaacttggaggttttcaaaaaggcctgcgggctgctcttcctcgacgcggagcgcattcgcgaagagctgacggtgaaggtttcgtatgcggggaatcaggagatccgcggccggtggaagcaggaagacggagacatgctcaagtcgtcgctcgcgaaggcgatgtacgacaagttgttcatgtggatcattgccgtgttgaaccgcagcatcaagcctccgggcggcttcaagatcttcatgggcatgctcgacatcttcggcttcgaagtcttcaagaacaactcgctggagcagttcttcatcaacatcacgaacgaaatgctgcagaagaacttcgtcgacatcgtcttcgaccgcgagagcaagctgtatcgtgacgagggtgtctcctccaaggagttgattttcacctcgaacgcagaagtgatcaagatcttgacggcgaagaacaactcggtgctcgctgcgctcgaggaccagtgcctcgcccctggaggcagcgacgaaaagttcctctcgacctgcaagaacgcgctgaaaggaaccaccaagttcaagcctgcgaaggtctctccgaacatcaatttcctcatctcgcacactgtcggcgacatccagtacaacgccgaaggcttcctcttcaaaaacaaagatgtcctgcgagcagaaatcatggaaatcgtgcagcaaagcaagaaccccgttgtcgcgcaactcttcgctggcatcgtcatggagaaggggaagatggccaagggacaactgattgggtcgcagttcctctcgcagctgcagagcctcatggaacttatcaacagcaccgagcctcacttcattcgctgcatcaagccgaacgacacgaagaagcccctcgactgggtgccgtcgaaaatgctcattcagctgcacgcgctctccgtcctcgaggctcttcagctccgtcaactcggctactcttacagacgtccgttcaaggagttcctcttccagttcaagtttatcgacctctcggcttctgaaaatccaaatctggaccccaaagaagctgcgctgagactcctcaaaagcagcaaactgcccagcgaagaataccagctcgggaagacaatggttttcctcaagcagacgggcgcgaaagaactgacgcagattcagagagaatgcctttcttcttgggagcctctcgtctcagtgctcgaggcgtactacgctggcagacgccacaagaagcagctgctgaaaaagacccccttcatcattcgcgcccaggctcacatccgcagacacctggtggacaacaacgtcagccccgcgactgttcagccggcgttctagacacgttcgtttgccttttgaactcttctcatccatttgttgttttctctcttcgccgtttccttcgagtgtcgttcgtgtgggttttgtatgtggaactgctttcgacgagagccgtttgtgcgcttctttgtgtagaggacgcggatcaaaggcggaactgatggtgtcagtccgtggctctttttgccttctttctttgtccagcaagtctgtgtttcgaagcaagaggagagacgcacacaagcaagggcgaggaaagtttatgtttgcaaacttgtctacgctcgcgagcgtgtgaacagcttcccctctcaaggcgcagaaagtcgcgctgcacgacgttcgtgttttggctacggggacgcgtaggtcgacgcgcgtccattcgctgctgtgtggtttgcgtctcgacgaggatgtagtgtgtttgctttagggacgtctctctgggcagacgcgactgccgtcgtgcgttgttttttcgctggttccgttcgaaggcgcacacaggcgacggccagagttcgcgttcgcgcttcttcaagtgaaaactgtgtggctcgcgcatgcgtcgctctcgaggcgcaggaaaaacgggtcgaagtgagcgtctctgagacgcgcatcgcaccgcgaaaaaccgcagggaacatgcaaagaagacagagaagcatgtggcggttttcgtgtgcggcgaaatctaggagagaggcctagaacgggtgaagcaggaaagaagtcgcaactgaacaagggatatcttcttttttcttctgcatgtcttcctgcgagagaagcaaatgtcgtggacgtcgccgtgagcgtcgcagctgttttctcgccgaagcagtcaccgtggaagccgagggaaaggcacagaccagtgtgcgcgcacatagagggcgggtttgtgttgcgccagaaagtggacgcactgagcatccgtggaagaacgaaaaaacagcaagtcaaaaaccgtagaaaacgcgaggaaatccagaatgcgtcgcctgcatgttgtgtgcgcctgacatttcataaaaatcggatatctgtctctaaaaaaaaaaaaaaaaaa

SEQ ID NO: 92 - protein, 831 aa, Toxoplasma gondii
  MISC_FEATURE (1)..(831): MyoA
MASKTTSEELKTATALKKRSSDVHAVDHSGNVYKGFQIWTDLAPSVKEEPDLMFAKCIVQAGTDKGNLTCVQIDPPGFDEPFEVPQANAWNVNSLIDPMTYGDIGMLPHTNIPCVLDFLKVRFMKNQIYTTADPLVVAINPFRDLGNTTLDWIVRYRDTFDLSKLAPHVFYTARRALDNLHAVNKSQTIIVSGESGAGKTEATKQIMRYFAAAKTGSMDLRIQNAIMAANPVLEAFGNAKTIRNNNSSRFGRFMQLDVGREGGIKFGSVVAFLLEKSRVLTQDEQERSYHIFYQMCKGADAAMKERFHILPLSEYKYINPLCLDAPGIDDVAEFHEVCESFRSMNLTEDEVASVWSIVSGVLLLGNVEVTATKDGGIDDAAAIEGKNLEVFKKACGLLFLDAERIREELTVKVSYAGNQEIRGRWKQEDGDMLKSSLAKAMYDKLFMWIIAVLNRSIKPPGGFKIFMGMLDIFGFEVFKNNSLEQFFINITNEMLQKNFVDIVFDRESKLYRDEGVSSKELIFTSNAEVIKILTAKNNSVLAALEDQCLAPGGSDEKFLSTCKNALKGTTKFKPAKVSPNINFLISHTVGDIQYNAEGFLFKNKDVLRAEIMEIVQQSKNPVVAQLFAGIVMEKGKMAKGQLIGSQFLSQLQSLMELINSTEPHFIRCIKPNDTKKPLDWVPSKMLIQLHALSVLEALQLRQLGYSYRRPFKEFLFQFKFIDLSASENPNLDPKEAALRLLKSSKLPSEEYQLGKTMVFLKQTGAKELTQIQRECLSSWEPLVSVLEAYYAGRRHKKQLLKKTPFIIRAQAHIRRHLVDNNVSPATVQPAF

SEQ ID NO: 93 - DNA, 3225 bp, Toxoplasma gondii
  misc_feature (1)..(3225): MyoB
atggagcgcaaacaaacccagatgatactggggcggagactggcgaaagactcaccggaggtgaagcattttcaaagaaaatcgagtgtcgttcctttcggccgtgatggacgcgctgccacgaactttacctgctggactgctgattgccccgcagtgaaagctgaccccaccctcgtttttgccaagtgcatagtcgtcggagggtccatggacacgcagctggaactcgagcaagtcgacccgccagcacgcgggacgtttacggttgcgcctacagatgtgttcaacgcaaacgagttgattgaaccggagacggtcgacgatatcggctatcttcctcacacgaatgtagcgtgtgtcttggatgttctaaaaagccgatttttgagaagcatcatttatacaacagctgagccacttctggtagctatcaaccccttcaaggacctggggaacaccacagatgcatggatatcgacatatcggaacgccagtaagcctgagatgcttccaccacatgtcttcaaaacggcccgcgccgcgcttgaggaccttgaaggctacaagaaaaaccaatcgatcattgtgtcgggcgaatctggagcaggaaagactgaagctacaaaacagatcatgcggttttttgcgtcggcgtcctctgaggtgcgcacgactatccaagacaccattatggcaggcaatcccatccttgaggccttcggaaatgccaaaacaatccgtaataataactccagccgatttggacgattcatgatgctcgatgtctcgtctcatcggggcattcagcacgggagtatatccaacttcctcctcgaaaaagtgcgtgtggtgtcccaggaagcgaacgaacgatcctaccatattttctaccagctgctcaaaggcgcgacgagcgaaatgcgtgcaaagtaccacttgcgcagtttaaaggagtacgcgtatctgaatggtaaaaacggtggatgctacgatgtcccgggcatcgatgacaaggccgatttcgaggaggtgcttcaatcgttggatgccatgcagatcacgggttcgaaacggcattcggtgttttcaattctctccggccttctgcttattggcaatgtaagcatagaaggaaaagacgcacagggtgtcccggatgcagcgtatatttcgccgcagagcgaggaaatcctggaggaagcttgccagctccttagcgttgatgacgcagcactcaagaaggaaattctcgtgaagtcgacgaaggttggacctcaggtcatcgaaggtgtgcgtacaaaggatgaggccaagacgtctgtgttgtcgctgtctaaaaatgtgtatgacaagctctttgactggcttgttcgccagcttaacagcttgattgacgctccagatggcatgcccaatttcattggaattcttgatatttttggctttgaagtcctcgaagtaaactcgcttgagcaggtcctgattaacattaccaatgagtatctgcaaaaacacttcatcgatgttgtcttcgatatggaaacgaagctttaccaagccgaaggtgttccgactgaggccctcgagtacacggataaccttgcacttgtcggcgctctctgtggaaagaacgattcgtttttcgctctgctcgaagatgcctgcttaggcatcaggtcaactgacgagggtttctgcgggacgatcctgcgccgcctggagccctcgggattctttttggagtctcgcagagacaaaaggctgaaatttataatccggcacacgattgccgatatcgagtatacatgtgaagggatgttggaaaagaacaaggactttcttcgtaaggaggtgatggatgtcatgaaggcgtcaactgaccctgtcacaaaggcgctcttcgaaggaattgaaatcgaggcaggaaaaatcggcaagggaacactaatcgcatccagattcctgaagaacttggaggagatgatcggaattgtagcgcaaacggaggcgcacttcatccgttgcctgaagccgaacgaggagaagaagcccctgggatggaatgggtcgaaggtgctgaatcagcttttctcgctttcgatcttggaggcacttcaactccgccaagtcggatacgcgtatcggcgcaacttcagcgaattctgcagtcatttccgatggctcgatctaggtcttgtgaattctgatcgcgacaggaaggaggtcgcgcagctgcttctcgaacaatcaggaattccggagtcgtcgtgggtgatcggaaaaacgatggtgttcgtgaagcctgacgcggcgaaggagttgtcgatcttgcagcgcgagaagttgatgtgtttccagcctctgatcggcgtcctgggcccgatgtggaggaaggttctcctccgaaagaagatggcaagggttatccacttcctcacgagactggaatcaaacgcgcgcagacatctggagccggacagcattaacatctctcctgaagaacgagaagcgttgttgtcgggaatggagcgtcctcgaaatccctgtgtcgtcgttaagaaacgcgttgaaccagagcgagcgccgccaacgaaggtgctcagcctatctcgcgctaggctttcgctctctaaagaactgcctcgaaattacgcagcgagcaacgaagccctggatgttgatgataccatgtctgtagacaccgatgccttcttacgtctcaaaatgaagcggtcgcccaacgagaactatctccgccagacagctttggcccgcctgaaagagcggcggccgtcgcacgtctgcatggaggaggcgtatcacgtgtggaggtcggtggaactactattcagagagcctctgagtgacaagagacttcagaacatttgcactgtaatccgaaacgatatggaccagcattacggctttttctggcaagtaatcatcaatcgcactcccaacttcggcatggctgcgactcatattcacgggtcccttcacgtcgttgaacaggaaggcatgtaccgagacggccgacaattcctcttccacctcatcatgtataaaacccggaaaccccgcaaggaagagattcgactccatgaaagggcggcggagaaaacgtatggcatctgtcgaaagagggatttctcaggtaatgctccaacacaggaatttgttattttctcactgacatggaaacataatcaaaaacatagctag

SEQ ID NO: 94 - protein, 1946 aa, Toxoplasma gondii
  MISC_FEATURE (1)..(1946): MyoB
MVESCLLTFRAFFWWIALIKMDLSDLGEAAAFLRRSEAELLLLQATALDGKKKCWIPDGENAYIEAEVKGSEDDGTVIVETADGESLSIKEDKIQQMNPPEFEMIEDMAMLTHLNEASVLHTLKRRYGQWMIYTYSGLFCVTINPYKWLPVYQKEVMAAYKGKRRSEAPPHIFAVANNAFQDMLHNRENQSILFTGESGAGKTVNSKHIIQYFATIAAMIESRKKQGALEDQIMQANTILEAFGNAKTLRNDNSSRFGKFIRMHFGARGMLSSVDIDIYLLEKSRVIFQQAGERNYHIFYQILSGQKELHDLLLVSANPSDFHFCSCGAVTVESLDDAEELLATEQAMDILGFLPDEKYGCYKLTGAIMHFGNMKFKQKPREEQLEADGTENADKAAFLMGINSSELVKCLIHPRIKVGNEYVTRGQTIEQVTCAVGALSKSMYERMFKWLVARINRALDAKLSRQFFIGILDITGFEILEYNSLEQLCINFTNEKLQQFFNWYMFVLEQEEYKKESIEWVSIGFGLDLQACIDLIEKPMGILSILEEECMFPKATDLTFKTKLFDNHFGKSVHLQKPKPDKKKFEAHFELVHYAGVVPYNISGWLEKNKDLLNETVVAVFQKSSNRLLASLFENYMSTDSAIPFGEKKRKKGASFQTVASLHKENLNKLMTNLKSTAPHFVRCINPNVNKIPGILDPYLVLQQLRCNGVLEGTRICREGFPNRLQYADFKQRYCILNPRTFPKSKFVSSRKAAEELLGSLEIDHTQYRFGITKVFFKAGFLGQLEAIRDERLSKVFTLFQARAQGKLMRIKFQKILEERDALILIQWNIRAFMAVKNWPWMRLFFKIKPLVKSSEVGEEVAGLKEECAQLQKALEKSEFQREELKAKQVSLTQEKNDLILQLQAEQETLANVEEQCEWLIKSKIQLEARVKELSERVEEEEEINSELTARGRKLEDECFELKKEIDDLETMLVKSEKEKRTTEHKVKNLTEEVEFLNEDISKLNRAAKVVQEAHQQTLDDLHMEEEKLSSLSKANLKLEQQVDELEGALEQERKARMNCERELHKLEGNLKLNRESMENLESSQRHLAEELRKKELELSQMNSKVENEKGLVAQLQKTVKELQTQIKDLKEKLEAERTTRAKMERERADLTQDLADLNERLEEVGGSSLAQLEITKKQETKIQKLHRDMEEATLHFETTSASLKKRHADSLAELEGQVENLQQVKQKLEKDKSDLQLEVDDLLTRVEQMTRAKANAEKLCTLYEERLHEATAKLDKVTQLANDLAAQKTKLWSESGEFLRRLEEKEALINQLSREKSNFTRQIEDLRGQLEKETKSQSALAHALQKAQRDCDLLREQYEEEQEVKAELHRTLSKVNAEMVQWRMKYENNVIQRTEDLEDAKKELAIRLQEAAEAMGVANARNASLERARHQLQLELGDALSDLGKVRSAAARLDQKQLQSGKALADWKQKHEESQALLDASQKEVQALSTELLKLKNTYEESIVGQETLRRENKNLQEEISNLTNQVREGTKNLTEMEKVKKLIEEEKTEVQVTLEETEGALERNESKILHFQLELLEAKAELERKLSEKDEEIENFRRKQQCTIDSLQSSLDSEAKSRIEVTRLKKKMEEDLNEMELQLSCANRQVSEATKSLGQLQIQIKDLQMQLDDSTQLNSDLKEQVAVAERRNSLLQSELEDLRSLQEQTERGRRLSEEELLEATERINLFYTQNTSLLSQKKKLEADVARMQKEAEEVVQECQNAEEKAKKAAIEAANLSEELKKKQDTIAHLERTRENMEQTITDLQKRLAEAEQMALMGSRKQIQKLESRVRELEGELEGEIRRSAEAQRGARRLERCIKELTYQAEEDKKNLSRMQTQMDKLQLKVQNYKQQVEVAETQANQYLSKYKKQQHELNEVKERAEVAESQVNKLKIKAREFGKKVQEE

SEQ ID NO: 95 - DNA, 3516 bp, Toxoplasma gondii
  misc_feature (1)..(3516): MyoC
atggagcgcaaacaaacccagatgatactggggcggagactggcgaaagactcaccggaggtgaagcattttcaaagaaaatcgagtgtcgttcctttcggccgtgatggacgcgctgccacgaactttacctgctggactgctgattgccccgcagtgaaagctgaccccaccctcgtttttgccaagtgcatagtcgtcggagggtccatggacacgcagctggaactcgagcaagtcgacccgccagcacgcgggacgtttacggttgcgcctacagatgtgttcaacgcaaacgagttgattgaaccggagacggtcgacgatatcggctatcttcctcacacgaatgtagcgtgtgtcttggatgttctaaaaagccgatttttgagaagcatcatttatacaacagctgagccacttctggtagctatcaaccccttcaaggacctggggaacaccacagatgcatggatatcgacatatcggaacgccagtaagcctgagatgcttccaccacatgtcttcaaaacggcccgcgccgcgcttgaggaccttgaaggctacaagaaaaaccaatcgatcattgtgtcgggcgaatctggagcaggaaagactgaagctacaaaacagatcatgcggttttttgcgtcggcgtcctctgaggtgcgcacgactatccaagacaccattatggcaggcaatcccatccttgaggccttcggaaatgccaaaacaatccgtaataataactccagccgatttggacgattcatgatgctcgatgtctcgtctcatcggggcattcagcacgggagtatatccaacttcctcctcgaaaaagtgcgtgtggtgtcccaggaagcgaacgaacgatcctaccatattttctaccagctgctcaaaggcgcgacgagcgaaatgcgtgcaaagtaccacttgcgcagtttaaaggagtacgcgtatctgaatggtaaaaacggtggatgctacgatgtcccgggcatcgatgacaaggccgatttcgaggaggtgcttcaatcgttggatgccatgcagatcacgggttcgaaacggcattcggtgttttcaattctctccggccttctgcttattggcaatgtaagcatagaaggaaaagacgcacagggtgtcccggatgcagcgtatatttcgccgcagagcgaggaaatcctggaggaagcttgccagctccttagcgttgatgacgcagcactcaagaaggaaattctcgtgaagtcgacgaaggttggacctcaggtcatcgaaggtgtgcgtacaaaggatgaggccaagacgtctgtgttgtcgctgtctaaaaatgtgtatgacaagctctttgactggcttgttcgccagcttaacagcttgattgacgctccagatggcatgcccaatttcattggaattcttgatatttttggctttgaagtcctcgaagtaaactcgcttgagcaggtcctgattaacattaccaatgagtatctgcaaaaacacttcatcgatgttgtcttcgatatggaaacgaagctttaccaagccgaaggtgttccgactgaggccctcgagtacacggataaccttgcacttgtcggcgctctctgtggaaagaacgattcgtttttcgctctgctcgaagatgcctgcttaggcatcaggtcaactgacgagggtttctgcgggacgatcctgcgccgcctggagccctcgggattctttttggagtctcgcagagacaaaaggctgaaatttataatccggcacacgattgccgatatcgagtatacatgtgaagggatgttggaaaagaacaaggactttcttcgtaaggaggtgatggatgtcatgaaggcgtcaactgaccctgtcacaaaggcgctcttcgaaggaattgaaatcgaggcaggaaaaatcggcaagggaacactaatcgcatccagattcctgaagaacttggaggagatgatcggaattgtagcgcaaacggaggcgcacttcatccgttgcctgaagccgaacgaggagaagaagcccctgggatggaatgggtcgaaggtgctgaatcagcttttctcgctttcgatcttggaggcacttcaactccgccaagtcggatacgcgtatcggcgcaacttcagcgaattctgcagtcatttccgatggctcgatctaggtcttgtgaattctgatcgcgacaggaaggaggtcgcgcagctgcttctcgaacaatcaggaattccggagtcgtcgtgggtgatcggaaaaacgatggtgttcgtgaagcctgacgcggcgaaggagttgtcgatcttgcagcgcgagaagttgatgtgtttccagcctctgatcggcgtcctgggcccgatgtggaggaaggttctcctccgaaagaagatggcaagggttatccacttcctcacgagactggaatcaaacgcgcgcagacatctggagccggacagcattaacatctctcctgaagaacgagaagcgttgttgtcgggaatggagcgtcctcgaaatccctgtgtcgtcgttaagaaacgcgttgaaccagagcgagcgccgccaacgaaggtgctcagcctatctcgcgctaggctttcgctctctaaagaactgcctcgaaattacgcagcgagcaacgaagccctggatgttgatgataccatgtctgtagacaccgatgccttcttacgtctcaaaatgaagcggtcgcccaacgagaactatctccgccagacagctttggcccgcctgaaagagcggcggccgtcgcacgtctgcatggaggaggcgtatcacgtgtggaggtcggtggaactactattcagagagcctctgagtgacaagagacttcagaacatttgcactgtaatccgaaacgatatggaccagcattacggctttttctggcaagtaatcatcaatcgcactcccaacttcggcatggctgcgactcatattcacgggtcccttcacgtcgttgaacaggaaggcatgtaccgagacggccgacaattcctcttccacctcatcatgtataaaacccggaaaccccgcaaggaagagattcgactccatgaaagggcggcggagaaaacgtatggcatctgtcgaaagagggatttctcaggcattgtgcgcgtcatgaatagcaaagtgccgccgtacatgcagaaggacgtctcgtacttgattggcatgctctttcagcgataccagtacactagagactggacgaattttgccacctgcattcagtcgtacctgattggccgttacagcgaaccgttcggaggagcttggaacgtggtagcacaggaaggcgcgtttttcttgagtcgcctgtggaccaaacatagtcgattcctgcgcgtggaaattgacttccctgctctagcagaacaggcgagtagtgaaccttgtccaggctgtcctaccccagtccttactgtcgtgtgcttcgaggcctgtgcgccggatagaccgtga

SEQ ID NO: 96 - protein, 1171 aa, Toxoplasma gondii
  MISC_FEATURE (1)..(1171): MyoC
MERKQTQMILGRRLAKDSPEVKHFQRKSSVVPFGRDGRAATNFTCWTADCPAVKADPTLVFAKCIVVGGSMDTQLELEQVDPPARGTFTVAPTDVFNANELIEPETVDDIGYLPHTNVACVLDVLKSRFLRSIIYTTAEPLLVAINPFKDLGNTTDAWISTYRNASKPEMLPPHVFKTARAALEDLEGYKKNQSIIVSGESGAGKTEATKQIMRFFASASSEVRTTIQDTIMAGNPILEAFGNAKTIRNNNSSRFGRFMMLDVSSHRGIQHGSISNFLLEKVRVVSQEANERSYHIFYQLLKGATSEMRAKYHLRSLKEYAYLNGKNGGCYDVPGIDDKADFEEVLQSLDAMQITGSKRHSVFSILSGLLLIGNVSIEGKDAQGVPDAAYISPQSEEILEEACQLLSVDDAALKKEILVKSTKVGPQVIEGVRTKDEAKTSVLSLSKNVYDKLFDWLVRQLNSLIDAPDGMPNFIGILDIFGFEVLEVNSLEQVLINITNEYLQKHFIDVVFDMETKLYQAEGVPTEALEYTDNLALVGALCGKNDSFFALLEDACLGIRSTDEGFCGTILRRLEPSGFFLESRRDKRLKFIIRHTIADIEYTCEGMLEKNKDFLRKEVMDVMKASTDPVTKALFEGIEIEAGKIGKGTLIASRFLKNLEEMIGIVAQTEAHFIRCLKPNEEKKPLGWNGSKVLNQLFSLSILEALQLRQVGYAYRRNFSEFCSHFRWLDLGLVNSDRDRKEVAQLLLEQSGIPESSWVIGKTMVFVKPDAAKELSILQREKLMCFQPLIGVLGPMWRKVLLRKKMARVIHFLTRLESNARRHLEPDSINISPEEREALLSGMERPRNPCVVVKKRVEPERAPPTKVLSLSRARLSLSKELPRNYAASNEALDVDDTMSVDTDAFLRLKMKRSPNENYLRQTALARLKERRPSHVCMEEAYHVWRSVELLFREPLSDKRLQNICTVIRNDMDQHYGFFWQVIINRTPNFGMAATHIHGSLHVVEQEGMYRDGRQFLFHLIMYKTRKPRKEEIRLHERAAEKTYGICRKRDFSGIVRVMNSKVPPYMQKDVSYLIGMLFQRYQYTRDWTNFATCIQSYLIGRYSEPFGGAWNVVAQEGAFFLSRLWTKHSRFLRVEIDFPALAEQASSEPCPGCPTPVLTVVCFEACAPDRP

SEQ ID NO: 97 - DNA, 2469 bp, Toxoplasma gondii
  misc_feature (1)..(2469): MyoD
atggcggcaaaaccggagcaggactgcaagacagcggcggctctcattcgggcggggtcgttgatagaaggcgttgaatcagcaggcaaagactttttagtctggacgacacagggccccgctgtaaaaaaagatccagatctcctcttcagtctctgtcgagtgttgcctggcagcacacagcagacgctgaaactccagcaggtcgaaccgactgcggactcacaggaactgaccgtccaagccaaggaagtttggcaggcgaaccccggcatcgaccccctgacttacggcgacatcggcgggctgccgcacacgaacgagccatgcgtgctggattttctggcgcgacgctaccagagcaaagtgatctacacgactgcagagccgctgattgtcgcagtgaatccgtttcaggacctgaaaaatgcgggcccggacacgattgcgctctacagagacgcccccgatgtggacaagctcccgccgcacgtcttctacgccagtcgacgcgccatgacgaacatgcaccagctgaagaagccgcagacgatcattgtcagtggcgagagtggcgctggaaagactgagacgactaagatgctcatgaagtacctggcaaccagcgccggtgggaacctggacctgaagatccagactgcgatcatggcggcgaaccctgtgctcgaggcgtttggaaacgcaaagacagttcgcaacaacaacagcagtcgcttcggcagattcatgctcctcgatgtcgccagagagggcggcattcaacacggcaaggttgtcgccttcctgttggaaaaaagccgaatcgtctgccaagacaaagacgaacgcaactaccacatcttctaccagttcttgaagggcgctcctggccatatgcgccagcggtacatgctgcagcccctggaggcatacaccttcatcaacccgcactgcctcgatgcaccagggatcgtcgacacggaggactttgagcaaacggtcaaatcattagagtcaatgaacatgacggagacggagacatgcaccatctggtcaatcgtctcaggtgttctgctcatgggaaatgccaagcctactggaaaaaccgaggctggtgtcgagaacgccgcatgcttcgtcggcgagtcagaagccgctctgcggaatgcatgcagtctgctcttcctcgactacccgagcattctacatgaactaacggtgaagacaacttatgccggaagcaacaagatcgagagtcggtggaccgtcccagactccgagatgctgcgtgcatctctggcgaagggcatgttcgaacagttgtttctgtggattattcgcaagctgaacgcagacattgagccgaagggaggatcgttcgatgtctttatgggtctgctggatatcttcggttttgaagttttccaaaacaactccctcgagcagttgttcattaacattaccaacgaagtgcttcagagaaactttacggacattgtcttcgagaaagaactgcagctctacagcaaagaaggcatctcatcgaagaaaattgaatacaccacgaatgaaaagctgattgagacccttctgggaaaaggaacttcggttttggctgccttggaggatcagtgcatctcgcctagcggaactgacgagaaatttgtctcgagtttggcgagcaagttggcggggaacaagtgcttcattccctcgaaaaacaccaagagtctggagttcaccgttgttcacaccatcgggaaagtcatctacaacgccgatggctttgctttcaaaaacaaagacgttctgcgcccggaaatcatcgaaatcacgcgggcgtcgacgaacgacgttgttcgcggcttatttgagggcgtcaaagttgagaaggggaagatggcaaaaggcatgttgatcggaagtcagtttatgacgcagctcaaggggctgatggaagtgattcagaaaacggaatctcacttcattcgttgcatcaaaccgaacgacgacaaggtgcctctcaagtgggtgaacagcaaggtcctcattcagctgcatgcactctcgattttggaggctcttcacctccgccaactcgccttctcctaccgaagaaccttcgaggagttcgctgcgcagtttcgcttcatcaatctgggcgtttcaaacaagccaggcgccgacgcgaagaccatctgtgtggagttgttgaagagcacaagcatttctgcagacgagtacgcactcggcaagacgatggtatttctcaagccgcaagcagcaaagatgttggtgcggctgcagcgcgaagcgttgtcagcttgggagcctctcgtcggtgtgttcgaggggatgactgttctgaaaagggcaaagcagctgtcgactggccgggcggtcccggcgactcgcatttgcgcgaatgttcgccgaaaactcgtccaagcgggcatcaaggtttgctag

SEQ ID NO: 98 - protein, 822 aa, Toxoplasma gondii
  MISC_FEATURE (1)..(822): MyoD
MAAKPEQDCKTAAALIRAGSLIEGVESAGKDFLVWTTQGPAVKKDPDLLFSLCRVLPGSTQQTLKLQQVEPTADSQELTVQAKEVWQANPGIDPLTYGDIGGLPHTNEPCVLDFLARRYQSKVIYTTAEPLIVAVNPFQDLKNAGPDTIALYRDAPDVDKLPPHVFYASRRAMTNMHQLKKPQTIIVSGESGAGKTETTKMLMKYLATSAGGNLDLKIQTAIMAANPVLEAFGNAKTVRNNNSSRFGRFMLLDVAREGGIQHGKVVAFLLEKSRIVCQDKDERNYHIFYQFLKGAPGHMRQRYMLQPLEAYTFINPHCLDAPGIVDTEDFEQTVKSLESMNMTETETCTIWSIVSGVLLMGNAKPTGKTEAGVENAACFVGESEAALRNACSLLFLDYPSILHELTVKTTYAGSNKIESRWTVPDSEMLRASLAKGMFEQLFLWIIRKLNADIEPKGGSFDVFMGLLDIFGFEVFQNNSLEQLFINITNEVLQRNFTDIVFEKELQLYSKEGISSKKIEYTTNEKLIETLLGKGTSVLAALEDQCISPSGTDEKFVSSLASKLAGNKCFIPSKNTKSLEFTVVHTIGKVIYNADGFAFKNKDVLRPEIIEITRASTNDVVRGLFEGVKVEKGKMAKGMLIGSQFMTQLKGLMEVIQKTESHFIRCIKPNDDKVPLKWVNSKVLIQLHALSILEALHLRQLAFSYRRTFEEFAAQFRFINLGVSNKPGADAKTICVELLKSTSISADEYALGKTMVFLKPQAAKMLVRLQREALSAWEPLVGVFEGMTVLKRAKQLSTGRAVPATRICANVRRKLVQAGIKVC

SEQ ID NO: 99 - DNA, 2493 bp, Toxoplasma gondii
  misc_feature (1)..(2493): MyoE
atgaacgctttctccatattcaggaggggcatgcgcggggggcccgcgagtgcacatggagacaagcttcgtcgagggagaacagaagtcgatccaaaggcggatacgctgcagggcatgaaaatatggacaaacaacgcgccagccgtgcacgcaaacgctgatgagtgctttgcgctctgccttattcttcccgagtcgagtgaaactgttctccatctgaagcagattgaccctccccctgacaccacagaagcggagtcattcacgatcgatccagaggatgcattcaacgcgaacatcggcatcgaagtggacaagttccctgacatcggtttgctccctcacaaaaattgcgcggcagttctggatttcttaaagcaacgatatctcctggatctcatttataccactgcagatcccctcctgatcgctatcaatccattcaaagatcttaacaacacgactccagagtggttacagctctaccgggatgcccccgacgccgagatactcgctccgcatgtctttcggctggcacgcacggtacttgagagattgtctgcctttatggccagtcaaaccatcatcgtcagcggcgagtcaggagcagggaaaacggaagccacaaagcagatcatgtcttactttgccgctgggaagcgaggagaggtatctcaccaacgcatccaaaatgccgtcattgcggcaaatcctgttctcgaagccttcggcaatgcgaagactgtccggaacaacaactccagtcgcttcggtcgcttcatgcagcttcaactgggggagaagggaggcatcgaatacggctccatccgcaactttttgttggagaaagtccgcgtgaccagtcaggagcaacatgagagatcctaccacattttttatcaactagtgaagggcgctgacgacgcaaaacgaaggcagctgcatctgcttaatctcgaagactacacctacctctcaaagaacggtggctgctacgactgtcccggaatcgacgacgtcaaagatttcaaagaaatgaataagagtttgcgctccataggtctcaacctggatgacgttgaaagcctttggtcgattatcgcaggcgtccttcttctgggaaacgtgcacttggaaagtcgggagacagacggtcagcctaatgcagctgccctcaccccagacggagaggcgaccctgcagaagtgctgtgcacttttgtttgtcgatgaggaggcagtgaaaaaggagattctctacaaagtcaaaacaattggtgaccaacaaatagagtccccaaacagcttgtcggatgctttgatgaatcgggactccttagcgaaggccgtgtacgagaagttgttcgattgggtcgttcgtcgtgtcaacgcaacaatcgaacctcctcaaggttttggaatcttcatgggaatgctggacatctttggtttcgaaatgtttgagaacaattccctggaacagcttctcatcaatatcaccaatgagcagctgcagaaaaactttatccaaatcgtttttgctcgtgaaacgaagttgtactacgaagaaggaatcggaaatgtgaaaattacgtggacagacaacgagaacgtgatcaaagctttgtgcgggaaatcgtcctcagtccttgccatactcgaggacaagagtcttgctccgggaggcactgatgaagcaatcgtcacgtccatgaaccaggctctaaagtcctctgatgtgtggaaacccgggcagaagaacccgcgtatttgcttttgcatctgccacaccattgccgatattcagtacgatgcaactggcttcatcgagaagaacaaagaccttctgaagcccgagctctgctccatcgtacaggcttcttcaaacaatgtggcaaaggaattatttgaaggtgtcgtcatgcagaagggcaagattgccaaggggcaactcattgcttctcagtttatgcgctctcttgatgctctcttgactctgatctcgagtacagaatcgcattttattcgttgcttgaaaccgaatgagacgaagaatcctcatgattggtcaaacggaaaagttctcgcgcagcttttctccctgtcgatcttggaagcactccaactcaagaatctttctttttcctaccggcggccgtacgcagacttcttgaaacagttcgagcagctagatctcgaggtcaccaggaagtccggaaatgcaaaggagaagacgaagcagcttcttactcgagcaaatgtaccacaagccaaatgggcgctcggcaacacaatggtgtttatgaaaccagacgcagttcgagagctgacacaaaaaatgcgactgattgtggtggcgtgggaaccgctcattcgtgttttagaggcttgccattcccgtgctttaaaaatgcgggccataagggacagtgtgcaatgggtggttcgaatccagtcacagatccggaaggcgcgagtgattatggagtag

SEQ ID NO: 100 - protein, 830 aa, Toxoplasma gondii
  MISC_FEATURE (1)..(830): MyoE
MNAFSIFRRGMRGGPASAHGDKLRRGRTEVDPKADTLQGMKIWTNNAPAVHANADECFALCLILPESSETVLHLKQIDPPPDTTEAESFTIDPEDAFNANIGIEVDKFPDIGLLPHKNCAAVLDFLKQRYLLDLIYTTADPLLIAINPFKDLNNTTPEWLQLYRDAPDAEILAPHVFRLARTVLERLSAFMASQTIIVSGESGAGKTEATKQIMSYFAAGKRGEVSHQRIQNAVIAANPVLEAFGNAKTVRNNNSSRFGRFMQLQLGEKGGIEYGSIRNFLLEKVRVTSQEQHERSYHIFYQLVKGADDAKRRQLHLLNLEDYTYLSKNGGCYDCPGIDDVKDFKEMNKSLRSIGLNLDDVESLWSIIAGVLLLGNVHLESRETDGQPNAAALTPDGEATLQKCCALLFVDEEAVKKEILYKVKTIGDQQIESPNSLSDALMNRDSLAKAVYEKLFDWVVRRVNATIEPPQGFGIFMGMLDIFGFEMFENNSLEQLLINITNEQLQKNFIQIVFARETKLYYEEGIGNVKITWTDNENVIKALCGKSSSVLAILEDKSLAPGGTDEAIVTSMNQALKSSDVWKPGQKNPRICFCICHTIADIQYDATGFIEKNKDLLKPELCSIVQASSNNVAKELFEGVVMQKGKIAKGQLIASQFMRSLDALLTLISSTESHFIRCLKPNETKNPHDWSNGKVLAQLFSLSILEALQLKNLSFSYRRPYADFLKQFEQLDLEVTRKSGNAKEKTKQLLTRANVPQAKWALGNTMVFMKPDAVRELTQKMRLIVVAWEPLIRVLEACHSRALKMRAIRDSVQWVVRIQSQIRKARVIME

SEQ ID NO: 101 - DNA, 5940 bp, Toxoplasma gondii
  misc_feature (1)..(5940): MyoF
atgacggcatcttctgcagatggggcgtctgccccgggaggcggcgacccgggagaggaggaggtccgctgcgccgttggaaccaagatctacgtccctgacgccgctgatgtttggagaacagcggaagtggtgaagatccaagaggatggcagtctcaccgccagagtcgatgcagacaatgaactggtgcagctcaaaaaaaacgatatatggtatctgtgcaataccgatgtgtggaacaccaccggactgagtgcgccgacagatttgacgatgctgacgcatttgcatgaggcggccgtcctcgactctctcaacctccgcttcgatatcgacgagatctacactttcacgggtcccattctgattgcggtcaatccttttaaacagatcacaggtctctacgacatgaagcaattggttcggtacatcgcgagttcggagctgccgatgcccggagtgccttcttcctcgtccggctcttcttccaacgcacccgtcgcgctgccgatatctcgacagcctcacgtcttcgcctcgagcagcgccgcgtaccagggcatgtgcaacgagaagcagagtcagacgattctgatttctggggagagcggagcaggcaagacagaaagcacgaaattcgtgatgaagttcctcgcctgtgccggcagcgaagacttggagcgccggtcgcaagtcgaggcgcaagtcctcgagagcaatcctctcctggaagcattcggaaacgcccggacgctgcgaaacgacaacagcagtcgcttcgggaagttcattgaactccagttccaaacaagcaaagccaagcggatgtctggaaaccgcggcaggctctgtggagctcgaattcaaacgtatttgctggagaaggtccgcgtctgcgaccagcaagagggagagaggaactatcacatcttctaccaactttgtgcagctgcagaagctgcagctcagacgggaggcatctattacttcccttccccgaaattccgaaaagccgcagatgcaaaggcacaagagatggatatgtctctcttcgagccgcgcgacaaattcaagtatttgaccaagagcagctgccaccagctgcagggcgtggacgactgcgaggagttcgagagcacgctcttcgcgatgcagacggttggcatctccccggaggagcaaatgagcattctctcggtcgtgggcgccgttctttgtctgggaaatgtttctttcgagactccgaaggccaatagcgaaggatcgcaggtcgcagcgagctgcactgagtacgtctgcaaggcctgccgccttctgggcgtccagagggaggctctgcaagaggcgatgtgctaccgaacaatcaagaccgcacacgagagctaccggaagccgttgaagacagacgaagcatgggagatgaaggacgcgctgtgtcgggcgctgtacggttgtctgtttctgcaagttgtcgcgaagacgaacgcgtctataggttacctgaaggaggtgcagagtgcagacgatttgcttctgttttgcggagtgctggacattttcggcttcgaatgtttccagttcaactcgttcgagcagctgtgcatcaacttcaccaacgagcgtctgcagaatttcttcaatacgttcgtcttcaagtgcgaggaagagctctaccgcgccgaaggcatccagtggaaccctctggacttcccggacaacgcagactgcgtcgcgctgctgcaggaaaagccgctcggtctgttctccatgctcgacgaagagtgcatgttccccgcaggcaaagaccgaggattcaacaacaaagtctgccagaaacacggcggtcacaaacgtttcggcgtgatcaaaacgaaacctaattgcttcgtggtgcaccactttgccggcagcgtagagtactgctccgacggatttctggagaagaacaaggaccagctgtccgtggatctgcaggaggcagtgaaggcttcgacgatcccgttcgtctccaacttgttttctgcgttcctgaaccgcggcacagcggaagacggatcggggaagaagcgaaagttcgtgacggtgtcgagcgagtttcgcgagcaactcggcgcgctgatggagaccgtcgacaagacggcaccgcacttcattcgctgcatcaaacccaatccgcagaacctcccagacctcttcgaccgcgcgacagtgaacgagcagctccgatatggaggcgtcctgcaagcggtgcaggtcagccgtgcagggtaccctgtgcgcctctcgcaccgcgactgcttcttcgactatagggcgctcgcagacggagcgcttgctgcgcagctgtcgcagggcacagagacgcccgaggcctggcgcggccgcgctgaggctctgctccgccacctggacgagaagctgaagctcgaccgccggaaaaaagagacagactccccggaccgaacctgggccgtcgggaagaccctctgcttcttcaaaaacgaagcgtacgagattctttcggcgaacttgatgagcgtgagggtggctgcggcgacggcgattgaggcgaggtacaagtgctttgtgcagaggcgattcttcctgatgtatcggcagactgtcgtttttctgcagtctcacattcgcatgtttctttgcaagttggaggcccagagactgcgagagtcacgcgctgcgcggcgcgtggagaacttcatgcgaggcgccgttgcgcgtctgcggtacctgcggactctggagaacatccggcgaattcaggcggcctggcgaggcaagcagacaaggtcgcagcttcgcgatcgaaagctcgaggaagccgccagtaaaatccaggcgttctggaagatgcacaagcaacgcatgttctacacgaatttgaagaaagcctcgactattgctcaactcaagtggaagagaattctggctcggcgcatgctgcggcgactgcgagaggaggctcgcgaggtctcaggccttctgaagaaggcgcaagatctgcagcgcgacttgtgcgaagagaagaacaagagaagcgacgcggaaagccatgttcttcagttgcaggcgaaaaacgaagatctcctcaaagaaatccagaaactccagagggaactcgaacgcgcgaaagaagatgtcgcttctctacaagcatctaacgacgactttgcttcacaagtaaagcagctgaaggagagtttgacggtgggctcttcgacgccaacgacgcctcagatgacattcgggacccacaagagaagggtgtcgaacaacgcagatgtcccccattctcaagagaaggacaagtttccgacagacgaggagttgaaggctttgcggacagagttggagagacgcgacgcggaggctcaacagcagcaggcagagcacgaggctctcatcgcggagctccgagcggcgttgaaggacgctgagagtgcatgtgaatacgagcgaacgcaacgcaaagaagctgaggcgcggtaccgactggtcctcgaagactcgagcgcaagcagtactcacgtccgcgcgtcgtctgcctcaaaggctgcggtcgcggactctgcgcccacagctctgttgagagagaagtgtatggagagcgacatggcgacagggcgacctggagactcgctcgcgtcttcggtcgcgtccgctgctcctctctcgcctccggtcgcgctggagcctgaactttgggagtcggtgctgcacgaccagcggtggatcgacttgcttctgctgggtcctgccggcgtgggcaagacaggtttgctggagcaatttcttgtgaagttgggagacgaagttcatctggagcagctccgagtgagccgaaagatggaggaccaagcgcccttcagcaagctgccgcaacactacgaactcgtctactctcccgacagccaggaaggccgtgaacgagaagaagctcgagtgaacgtactcgactttccaggcctctcgcgtaccaagcagaatcccgcgctgagggtcaagcaggccttcgtcgtcgcggtcgtcttcgatcccaccagacctgaaacttgtgcagaggcgctgcaaatcttgaccaacgtcgtgctgcctgctcggcccaaagtctctgcacaagacccgttgggcgcctgcatcagcggcagagtttacctcgttgaaaacgggtggcgcgcagccgccaaagaagctgctgtgcaagtcgacactgcagctgtcagagacaaagctgcgggtctccgctgtcactaccgcgaattggtgcatctggagtctctggtcgacgaaattgtgcctctgatgtcgagctggagagatctgcttcagcagcagagacttgccatgctgcagcaccacgcgcggctgcagccgggtgggccttctccgcatgcgtctccgttctccctgcctcgctcgcagacaggtcgcggagcttcgctcttcgccactgcgtcgcagtctggagctctaggcgcctccgctgtcggaggacaggagaacggagttgagaagtcgtcgtcgggcgtctctgctcacagacagggaggcttgtctgcgaacttcttcgacagcattcgctctttcctctcacagtcgtcgatgcgacctgcggggaacgttctggcttctggaaagcaggccgcggacctgaagctgctcagaccgagcatgaagcctgggggcaccgcgatgatgaagaaactgaagacgcgaagtctcgaccaacactcggtcgtccctgtgcaggaactgcaggactcggactctgcgatcacctgcgtggtgtttggcaaggagaaagaaaaccgggactacattcttctcgcggctgcgagcaaagacggcagcgtagtgatctaccggtgttaccgtctagaagctgaaagacaaatgttcgaccaggagcaagtttctctagtcactcctgcggcttcgcggaccactgacagcaaggagcacatcgggccttctgtctccgtgcactcgcgactcgtggggcacagccgcgccgtcacctgtctcttcttctcgctcttggaagaccagctgattacaacttcaatcgacaagtctgtgcgattttggcatgtcgatacgggggacatgctgaaagtcttcacagactcttctcctgcgctggctgccgccttcctcccgttcaaccccacagcctttgtcgcgtcgaactcaaactccattcttcggctggtctgcgccaccagtggacgcgtgattcagaagctgaaagtggagagcgaagtgagggcgctcaagttcgacgacacagggctcttctgttttgctggaacgaaggcaggagcagtccacgttctggaggccagcgacacagtcaacattcgatttaaattcaagacttctttggggaagggcgctgtgacgtgcatcacctttgtgccgagcacaggacctggacagtatccgcgcctcctcatcaactgctgcgactccagcgtcgccgtcgtcgagtgtatctacggcccgcctccgggcgtcctcaccaacttgctcgttcgccaccgtgtgagaatcgcccacagtctgcttcctctaagatgctggttctcaaactttggaggagggtggcttatcaccggtagtgaggacaaggacgtgtactgtttctctcttcaacaaggcgcgaacttcaaggcaatctcgctcaaacatcaccaggtaacgcctgaactgacagagatcatgggtccctcatcgaatttcagagacagctgttttttcttcttcacacccttcatcttcagtctttgtcatttctctcagtcggtttttgtatctctgtctctcatctgtatcggattttctccccgtagctttccctgtctgtactctgttttcagcctctgtccgctgcgctatgtgtgtgtgtgtctcttgtga

SEQ ID NO: 102 - protein, 1979 aa, Toxoplasma gondii
  MISC_FEATURE (1)..(1979): MyoF
MTASSADGASAPGGGDPGEEEVRCAVGTKIYVPDAADVWRTAEVVKIQEDGSLTARVDADNELVQLKKNDIWYLCNTDVWNTTGLSAPTDLTMLTHLHEAAVLDSLNLRFDIDEIYTFTGPILIAVNPFKQITGLYDMKQLVRYIASSELPMPGVPSSSSGSSSNAPVALPISRQPHVFASSSAAYQGMCNEKQSQTILISGESGAGKTESTKFVMKFLACAGSEDLERRSQVEAQVLESNPLLEAFGNARTLRNDNSSRFGKFIELQFQTSKAKRMSGNRGRLCGARIQTYLLEKVRVCDQQEGERNYHIFYQLCAAAEAAAQTGGIYYFPSPKFRKAADAKAQEMDMSLFEPRDKFKYLTKSSCHQLQGVDDCEEFESTLFAMQTVGISPEEQMSILSVVGAVLCLGNVSFETPKANSEGSQVAASCTEYVCKACRLLGVQREALQEAMCYRTIKTAHESYRKPLKTDEAWEMKDALCRALYGCLFLQVVAKTNASIGYLKEVQSADDLLLFCGVLDIFGFECFQFNSFEQLCINFTNERLQNFFNTFVFKCEEELYRAEGIQWNPLDFPDNADCVALLQEKPLGLFSMLDEECMFPAGKDRGFNNKVCQKHGGHKRFGVIKTKPNCFVVHHFAGSVEYCSDGFLEKNKDQLSVDLQEAVKASTIPFVSNLFSAFLNRGTAEDGSGKKRKFVTVSSEFREQLGALMETVDKTAPHFIRCIKPNPQNLPDLFDRATVNEQLRYGGVLQAVQVSRAGYPVRLSHRDCFFDYRALADGALAAQLSQGTETPEAWRGRAEALLRHLDEKLKLDRRKKETDSPDRTWAVGKTLCFFKNEAYEILSANLMSVRVAAATAIEARYKCFVQRRFFLMYRQTVVFLQSHIRMFLCKLEAQRLRESRAARRVENFMRGAVARLRYLRTLENIRRIQAAWRGKQTRSQLRDRKLEEAASKIQAFWKMHKQRMFYTNLKKASTIAQLKWKRILARRMLRRLREEAREVSGLLKKAQDLQRDLCEEKNKRSDAESHVLQLQAKNEDLLKEIQKLQRELERAKEDVASLQASNDDFASQVKQLKESLTVGSSTPTTPQMTFGTHKRRVSNNADVPHSQEKDKFPTDEELKALRTELERRDAEAQQQQAEHEALIAELRAALKDAESACEYERTQRKEAEARYRLVLEDSSASSTHVRASSASKAAVADSAPTALLREKCMESDMATGRPGDSLASSVASAAPLSPPVALEPELWESVLHDQRWIDLLLLGPAGVGKTGLLEQFLVKLGDEVHLEQLRVSRKMEDQAPFSKLPQHYELVYSPDSQEGREREEARVNVLDFPGLSRTKQNPALRVKQAFVVAVVFDPTRPETCAEALQILTNVVLPARPKVSAQDPLGACISGRVYLVENGWRAAAKEAAVQVDTAAVRDKAAGLRCHYRELVHLESLVDEIVPLMSSWRDLLQQQRLAMLQHHARLQPGGPSPHASPFSLPRSQTGRGASLFATASQSGALGASAVGGQENGVEKSSSGVSAHRQGGLSANFFDSIRSFLSQSSMRPAGNVLASGKQAADLKLLRPSMKPGGTAMMKKLKTRSLDQHSVVPVQELQDSDSAITCVVFGKEKENRDYILLAAASKDGSVVIYRCYRLEAERQMFDQEQVSLVTPAASRTTDSKEHIGPSVSVHSRLVGHSRAVTCLFFSLLEDQLITTSIDKSVRFWHVDTGDMLKVFTDSSPALAAAFLPFNPTAFVASNSNSILRLVCATSGRVIQKLKVESEVRALKFDDTGLFCFAGTKAGAVHVLEASDTVNIRFKFKTSLGKGAVTCITFVPSTGPGQYPRLLINCCDSSVAVVECIYGPPPGVLTNLLVRHRVRIAHSLLPLRCWFSNFGGGWLITGSEDKDVYCFSLQQGANFKAISLKHHQVTPELTEIMGPSSNFRDSCFFFFTPFIFSLCHFSQSVFVSLSLICIGFSPRSFPCLYSVFSLCPLRYVCVCLL

SEQ ID NO: 103 - DNA, 6180 bp, Toxoplasma gondii
  misc_feature (1)..(6180): MyoG
atgacggacaggtgctggattcctcatcccactgaggtttgggggatcgcagttccagccggggcccccggcacctgcacgtataaacttgtcgaggtcaccgatgatggcaccgacccgcgcaaattggaagtcactttagccaagtcagctttgacacaagtcgcgcctgttacagacccgcgatcccttgaaggcgtccaaaatgtatgcgtcctgggcgatgtgtcagaggcgtctgttctccatacagtccgtcttcgatatcaaagagacgaaatctacacaaacgtagggcacattgttctcgccctcaatccctttaaatatctccagctgtatggtcccgacttcgttcggacttattttgaagacacgcatgtattcgacctcccaccgcatctcttccaagtttctgcggccgcagtcaaaggtctatcagaaagagggaaacctcagagcacgctgatcacaggcgaatccggcgctggcaagacggagtcgaccaagttgattcttcagtttcttgccgacgtcagtgagttatcctcgtcttcgtcgtcttcgttcaaagtttcttctggcgcacgcttagtggagagagctgaaaggaacagaagcatcagtcagaaagaccgggggtcttgcgggactggaggagacaacgctctccaatcaggcgttggatctggaagccaagggcgcgaggcgacgtctcttcaacagagaattttagagataagcccggtcttggagagcttcggaaatgcatcgactagcagaaaccccaactccagtcgatttgggaagtggattgaagtctatttcggggacaaattaaaggtcctaggcgccagtatcacgtcgtaccttctcgagcttccacgcgtgactcgccacatcgcaggggagagaaactaccatgtcttttaccaactagttcacggtttgaatacatctgatttagtcggcgtggctgaaacgtatcgcctgggaaccgattcactggccttctcctatctcacacctcaagaacaaaccgtgaacaccaaaagtacaaaagcagacacagaggtttcgtcgccggctcctgatattgatgatctcaccggcttctcagagctgaaacgcgccctgctggtcctgggtttcagtccttcaacccagaattccattttctctattgtggcggcgattcttcatcttggcaacgtcacttttgctcccgaagccggaggtgaaaagtgctctgtggtgagcaacagtcgcgatcacctcacagcagcgagcgagctcttgggcctcgatgtgccgctggtggaaggagctctgacgagccgtaagatgaagacaggaaatgagagcattctgattccgctcaagaccgaccaagccgatgccgcgcgcgacagctttgcaaagctcgtttacgggtatctcttcaactggctcattgcgcagaccaacgcaaatctagcgccttctggaggaatggatttcgatttgaatcgctacgtggggctgctggacatcgctggtttcgagagctttcgcgtaaacggatttgagcagctctgcatcaatctgtcgaatgaagagttgcaacaccatttcaatgcagatattttcctgaacgaagtcaaggactacgagaatgatggactgcagggggtctcaattacgtatgaggacaacgccgatgtgttgtcgctgattgcgggaaaaggcggcgtcattgcaactctcgacgaagaggtgtttgtccccagaggctctgatcaaggcttcctcaacaaattgaacaaggcccaaacgaaccacaaacgctacattgagaacaaaataaaagggtcgatggccttcggcattcaacactacgcaggagatgtgacttacactgtcaccggctggctcgtgaaagaccaaaatgcgccgcctcaagaggcgagagactgcctcttaacttcggaaaatccagttgtaaaggccattatggagacagcgtccagcgacactcaacgacgaggcccgggagggaagagtactgtaggctctgtcttcaagaagcaactgagtgagctgatggcgaagataaatggaactgacagtcactacatccggtgcatcaaaccgaaccccgcacataagccgagggtgatccactcgagccagattctgaatcaactcgtctgctcaggcgtcatggaggcaattcgcattcggaagtcggggttcgccttgcgtctcttacatcaggacttcgtggaccgctaccggctcgtgttgggctcgaaagccgcggcaggccttcggacccttgatgccgccagtgcagcccagcagctggtaacccagctggttgcgaacaaatgggtttcccaggaggaatgtctcatcggcagaaccaaggtattcgccaaatccactgttcaagacttccttgaacgcgcccgagaggaagctctggtcgaacccgtgattctcattcaagctctgtatcgcggctaccgaacccgccagcagtgcagagttctctttgaggtgtatggacagctgaaggagtttctggacgcgggcggcgaggcgtcgaagcgcgggggctacttgacagatcccgttttccccgatgccagcacccctgagctgcttcagaagaaagcgaattcgttgggagatttaatttcacaactcgagactcttgatgcctctcttcaaccaaggtgcctgtcaactgtctccaagtaccacgttcgaatgacccaggaagcgtcgctttccctggagctcaagcgtcagctggaactcacagatggagagggcgctgaggacgagtgtgacgcactctcaatgctacgcgcgactctgcagaaagcagaaagtaaaaaagtctcaggacctttcgttactgcggcgcgagagcgggtgaatcgactggaggcagagaccagcctcggagacttgcttgaccaggctctgcaggccaaagacaaagatgatttagcccacctcctaacagaggcgaggcagcttgagctctcgtccacgccctctcgcttcttcacttcctacctctcctcggtcgttgccgcggcagaggcgtaccttgcgagcaacgcgagagagaatgaacgacttcagcgagagagggaacaggcagcagagtcccggaaggcgctgaaggaaagacagcagcaagaggccctgctgaaggatgcagttgaagagcgcaaacgaagtgatcggttgtctcttctctctgtggcttccgatatcaaaaaggccaagaggaaccacgaggctcatcgaggtgtacagacagcagaaacgtccagcctgaggatcgagtacgacgaggaagcaaccgtgtccacatccgagtcagagtggactgaaagcagcgaagcagaaagcgaagagcctctcagcgacccctactccaccaaagatgaagaaggcggcgaaggcctggcgtctgcgtatctgcggaagttcatgcaggaggtggcgcgcgcgacccgggagtgcgacccggcgcagctgacattttttctcgagcgggcgagagaagcgaatctcggtaaaggcccgcgagagctgcagcttgcgcgcgtgcagttggagaatttaagcgatccgtcgttcctcaacgcggagttgaaggaggcgacgatcggcgtcacgtggggtgttgcgacacaggaagacttcgtcaagctgcggaacctcgttgagcaagcgaaggcgatcagagcgaagcagaagggagaagcagagagatctgaccctctgcgcctccaaaccattgacgagaaagtcttggcatcggcagctgcaacgcttgagtctctgaggagaacggaaggcagagaacgcggttcctccgccaagtttggaggcaccttcggtgagaggggagacagaggaggtggactgacggcgtatcttttcgagaactaccccctgcttggcatcaacatccggattcaggaaaccaagagcatgcgaaagacggagcaacttgtgctgcgccgggaggaactgttgagccatcaaacggatcctttggcagagcctttgctgcagctgcctgaccatcacgccgaggtggtggcgctgacgtgctttcgctctcttttgggagtgatgggagagcgtttctgtgtagggcgaagcgcgctgagtgacgagattttggcgttgggcagaaacgcagaagatcttcgagacgagatttactgtcaaattctcaagcagctgagaaacaatccctcggcagggagcaccgttgcgggactccggcttctccagtcctgctgtcagacctttccgccttccgagactctcgcgccttacctccgcttcgcgatccagagtttcttgtctgggctctctgcgcctggaggcgagagcacgggcgccatcaaatttcagcaagaagtggagcaaatctgtcgacaggctctacacgatctcgagctgacctgcggagcctcgagagaagagggaaggcggccaggggacagcacgggccaaggcgctgtctccgccgaacgagagacacgcatgtatgttcagatacgactcgcagacggatcacagcgacgcctcgcgcttgacggcgaccttccaggcgatctctctcggcgtctggtgaaggatctgaatttactcggtgcagactcttgggccattatggaacagctttcccagtacgaccttaaaaagacaagcgcgcgagaatctccaccagccacatttcgcctcttaccacctgaggaacttgttcaggattacctctccaaacgagattctcaggtccagttatggcttcgtcgtccgatgctgagtctggaagatcctctgtctctgcatcctgcgacggcagcgctgatatatcgtcaggcagtctctcagtatcaacagcatgtcttcaatgaggatcccagtctcctagcatcgataagtgcccatttgcttcaagcggacggtctcctagactcttcgccgcctcgagttccaccctggccgtcactcagctggaccattcctcagcgtctccactggcttcggagtgaagcagactggacagcagccattgcggaagaggcgaagcacatcgaccctgaggaaggcgaccttctcgctatgggggctgcgttccgcctcatgcagaagttgcgaggctttggaggctatgtttggcttgcagacgccttcccacttttttcggcggacctgaaaggcgaggcgcgactgcatgcagtgttgaagcagacaacgcctgggtcgcgtgtttctctctcgccgttgattgaaatgaggcgagtgccgttggcgcttcgtcgccggtttttgccgctgttaggcgatgaagaagacagggagtggatgcagcagctcgcgctccttgcgcagaagcagcaaacgaggcgaagtcgaaaaacagatccgacgcatacctcaagctcgtcatcgaaggcagcgtggctcaacgaaggcagcgatgggcatgttctctctacgaagatagcgaacttcaagagacgcgtctgcagagccctgctgtgcaggacagatccgtcgtcgcgcagtgcctcttggggagctgtgagaggccggaaacgagaccctaagaaaacgaaaaacgcgttcaaactcactggaaggtggtggattgccgtgagccaccgcggaatcgaaatcgcgactgtcttcgattcagacggtctcgcggcggcgcccgtgcctgactccgaggcagcactgttcgcttctgagactgaccgaaggaccgaaaaaagaccacagaaacggggaaaagcgtggaaggactcggacgaagacgcagaagatggagccatgcaggaagacgcggacctcgaaaaccacagaagcacagcgagagaacacaacggagacagcggcaggaacagtgaaatacaacagggctcagaaaaaggcgtattcaccatttctccggagaagctttggctggttgctgccgtgccgcctcgtggggaagcacctgaccgcctcattttgggctacgacgatcccaggacaggaaaaagaaggttggaggcatttgtcactcaagttgctgcggacgacgtggttcgtctcgttcttttattcttccccttctgtgccctcgataatcaggctcctccgacaggttaa

SEQ ID NO: 104 - protein, 2059 aa, Toxoplasma gondii
  MISC_FEATURE (1)..(2059): MyoG
MTDRCWIPHPTEVWGIAVPAGAPGTCTYKLVEVTDDGTDPRKLEVTLAKSALTQVAPVTDPRSLEGVQNVCVLGDVSEASVLHTVRLRYQRDEIYTNVGHIVLALNPFKYLQLYGPDFVRTYFEDTHVFDLPPHLFQVSAAAVKGLSERGKPQSTLITGESGAGKTESTKLILQFLADVSELSSSSSSSFKVSSGARLVERAERNRSISQKDRGSCGTGGDNALQSGVGSGSQGREATSLQQRILEISPVLESFGNASTSRNPNSSRFGKWIEVYFGDKLKVLGASITSYLLELPRVTRHIAGERNYHVFYQLVHGLNTSDLVGVAETYRLGTDSLAFSYLTPQEQTVNTKSTKADTEVSSPAPDIDDLTGFSELKRALLVLGFSPSTQNSIFSIVAAILHLGNVTFAPEAGGEKCSVVSNSRDHLTAASELLGLDVPLVEGALTSRKMKTGNESILIPLKTDQADAARDSFAKLVYGYLFNWLIAQTNANLAPSGGMDFDLNRYVGLLDIAGFESFRVNGFEQLCINLSNEELQHHFNADIFLNEVKDYENDGLQGVSITYEDNADVLSLIAGKGGVIATLDEEVFVPRGSDQGFLNKLNKAQTNHKRYIENKIKGSMAFGIQHYAGDVTYTVTGWLVKDQNAPPQEARDCLLTSENPVVKAIMETASSDTQRRGPGGKSTVGSVFKKQLSELMAKINGTDSHYIRCIKPNPAHKPRVIHSSQILNQLVCSGVMEAIRIRKSGFALRLLHQDFVDRYRLVLGSKAAAGLRTLDAASAAQQLVTQLVANKWVSQEECLIGRTKVFAKSTVQDFLERAREEALVEPVILIQALYRGYRTRQQCRVLFEVYGQLKEFLDAGGEASKRGGYLTDPVFPDASTPELLQKKANSLGDLISQLETLDASLQPRCLSTVSKYHVRMTQEASLSLELKRQLELTDGEGAEDECDALSMLRATLQKAESKKVSGPFVTAARERVNRLEAETSLGDLLDQALQAKDKDDLAHLLTEARQLELSSTPSRFFTSYLSSVVAAAEAYLASNARENERLQREREQAAESRKALKERQQQEALLKDAVEERKRSDRLSLLSVASDIKKAKRNHEAHRGVQTAETSSLRIEYDEEATVSTSESEWTESSEAESEEPLSDPYSTKDEEGGEGLASAYLRKFMQEVARATRECDPAQLTFFLERAREANLGKGPRELQLARVQLENLSDPSFLNAELKEATIGVTWGVATQEDFVKLRNLVEQAKAIRAKQKGEAERSDPLRLQTIDEKVLASAAATLESLRRTEGRERGSSAKFGGTFGERGDRGGGLTAYLFENYPLLGINIRIQETKSMRKTEQLVLRREELLSHQTDPLAEPLLQLPDHHAEVVALTCFRSLLGVMGERFCVGRSALSDEILALGRNAEDLRDEIYCQILKQLRNNPSAGSTVAGLRLLQSCCQTFPPSETLAPYLRFAIQSFLSGLSAPGGESTGAIKFQQEVEQICRQALHDLELTCGASREEGRRPGDSTGQGAVSAERETRMYVQIRLADGSQRRLALDGDLPGDLSRRLVKDLNLLGADSWAIMEQLSQYDLKKTSARESPPATFRLLPPEELVQDYLSKRDSQVQLWLRRPMLSLEDPLSLHPATAALIYRQAVSQYQQHVFNEDPSLLASISAHLLQADGLLDSSPPRVPPWPSLSWTIPQRLHWLRSEADWTAAIAEEAKHIDPEEGDLLAMGAAFRLMQKLRGFGGYVWLADAFPLFSADLKGEARLHAVLKQTTPGSRVSLSPLIEMRRVPLALRRRFLPLLGDEEDREWMQQLALLAQKQQTRRSRKTDPTHTSSSSSKAAWLNEGSDGHVLSTKIANFKRRVCRALLCRTDPSSRSASWGAVRGRKRDPKKTKNAFKLTGRWWIAVSHRGIEIATVFDSDGLAAAPVPDSEAALFASETDRRTEKRPQKRGKAWKDSDEDAEDGAMQEDADLENHRSTAREHNGDSGRNSEIQQGSEKGVFTISPEKLWLVAAVPPRGEAPDRLILGYDDPRTGKRRLEAFVTQVAADDVVRLVLLFFPFCALDNQAPPTG

SEQ ID NO: 105 - DNA, 2457 bp, Plasmodium falciparum
  misc_feature (1)..(2457): MyoA
atggctgttacaaatgaagaaataaaaacggcaagtaagattgttagaagagtttcaaatgtagaagcatttgacaaaagtggttcagtttttaagggttatcaaatatggactgatatatctccgacaatagaaaatgatccaaatattatgtttgtaaaatgtgttgtacaacaaggatcaaaaaaagaaaaattaaccgttgtacaaattgatccacccggaacaggaactccatacgatattgatccaactcacgcatggaactgcaactctcaagtagaccccatgtcttttggtgatattggtcttttaaatcacaccaacatcccatgtgttcttgactttttaaagcacagatatttaaaaaatcaaatatacaccactgctgttccccttattgttgcaataaacccatacaaggatttaggaaacacaactaatgaatggattcgtagatatcgtgatacagctgatcatactaagttgccaccacacgtgttcacatgtgctagggaagctttgtctaatctccatggtgtaaacaagagccaaactattattgtatctggtgaatctggtgcaggaaaaaccgaagcaacaaaacaaatcatgagatattttgcttcttctaagagtggaaatatggatttacgtattcagacagcaataatggctgcaaatccagttcttgaagcttttggtaatgcgaaaactataagaaataacaattcatctcgttttggtcgtttcatgcagttggttatatcccatgaaggaggtataagatacggttccgttgttgcttttctgttggaaaaatctagaattattacacaagatgataatgaaaggtcatatcatatattttatcaatttcttaagggtgcaaatagtacgatgaaatctaaatttggtttaaaaggagttactgaatacaaattattgaacccaaattcaacagaggtaagtggagtagatgatgtaaaagattttgaagaggtaattgaatcgttgaaaaatatggaattaagtgaatcagatattgaagtaatattttcaatagtagctggtatattaacattaggaaatgtaagattaattgagaagcaagaagctggattaagtgatgctgctgctattatggatgaggatatgggtgtgtttaataaagcttgtgaattgatgtatttagaccctgaattaataaaaagggaaatattaattaaggtaactgttgctggaggaacaaaaattgaaggtagatggaataaaaatgatgcagaagtgttgaaatcttccttatgtaaagctatgtatgagaaattgtttttatggataataagacatttgaattcaagaattgaaccagaaggaggatttaaaacatttatgggtatgttagatatttttggttttgaagtatttaaaaataattcattggaacaattatttattaacattactaacgaaatgcttcagaaaaattttgtagatattgtttttgaaagagaatcaaaattatataaagacgaaggaatatcaacagctgaattaaagtacaccagtaataaggaagtaataaacgtactttgtgagaagggtaaatcagtactttcatacttagaggaccaatgtttagcacctggaggaaccgatgaaaagtttgtaagttcctgtgctacaaatttaaaggaaaataataagtttaccccagcaaaagtagcatcgaataaaaattttataatacaacatactataggaccaattcaatattgtgctgaaagctttttgcttaaaaacaaggatgtcttaagaggtgatttagttgaagtaattaaggattcccccaatccaatagtacaacagttatttgaaggtcaagtaattgagaagggtaaaatagctaaaggttcattaataggttctcaatttttaaatcaattgacatctttaatgaacttgataaatagtactgaaccacatttcatacgttgtattaaaccaaatgaaaataaaaaaccattagaatggtgtgaaccaaaaatattaattcagcttcatgccttatcaattttagaagcattagtattaagacaattaggatattcttatagaagaacctttgaagaattcttatatcaatataaatttgtggacattgctgctgctgaagattcatcagttgaaaaccaaaataaatgtgttaatatattaaagttgtctggactatctgaatccatgtataagataggaaaaagcatggtctttttgaaacaagaaggtgcaaaaatattgacaaaaatacaaagagagaaacttgttgaatgggaaaattgtgtgagtgtaattgaagctgctatacttaaacacaaatacaaacaaaaggttaacaaaaatataccttctcttttgagagtacaagctcatataagaaaaaaaatggtagctcaataa

SEQ ID NO: 106 - protein, 818 aa, Plasmodium falciparum
  MISC_FEATURE (1)..(818): MyoA
MAVTNEEIKTASKIVRRVSNVEAFDKSGSVFKGYQIWTDISPTIENDPNIMFVKCVVQQGSKKEKLTVVQIDPPGTGTPYDIDPTHAWNCNSQVDPMSFGDIGLLNHTNIPCVLDFLKHRYLKNQIYTTAVPLIVAINPYKDLGNTTNEWIRRYRDTADHTKLPPHVFTCAREALSNLHGVNKSQTIIVSGESGAGKTEATKQIMRYFASSKSGNMDLRIQTAIMAANPVLEAFGNAKTIRNNNSSRFGRFMQLVISHEGGIRYGSVVAFLLEKSRIITQDDNERSYHIFYQFLKGANSTMKSKFGLKGVTEYKLLNPNSTEVSGVDDVKDFEEVIESLKNMELSESDIEVIFSIVAGILTLGNVRLIEKQEAGLSDAAAIMDEDMGVFNKACELMYLDPELIKREILIKVTVAGGTKIEGRWNKNDAEVLKSSLCKAMYEKLFLWIIRHLNSRIEPEGGFKTFMGMLDIFGFEVFKNNSLEQLFINITNEMLQKNFVDIVFERESKLYKDEGISTAELKYTSNKEVINVLCEKGKSVLSYLEDQCLAPGGTDEKFVSSCATNLKENNKFTPAKVASNKNFIIQHTIGPIQYCAESFLLKNKDVLRGDLVEVIKDSPNPIVQQLFEGQVIEKGKIAKGSLIGSQFLNQLTSLMNLINSTEPHFIRCIKPNENKKPLEWCEPKILIQLHALSILEALVLRQLGYSYRRTFEEFLYQYKFVDIAAAEDSSVENQNKCVNILKLSGLSESMYKIGKSMVFLKQEGAKILTKIQREKLVEWENCVSVIEAAILKHKYKQKVNKNIPSLLRVQAHIRKKMVAQ

SEQ ID NO: 107 - DNA, 5940 bp, Plasmodium falciparum; identical to SEQ ID NO: 101
  misc_feature (1)..(5940): MyoF

SEQ ID NO: 108 - protein, 1979 aa, Plasmodium falciparum; identical to SEQ ID NO: 102
  MISC_FEATURE (1)..(1979): MyoF

SEQ ID NO: 109 - DNA, 12227 bp, Homo sapiens
  misc_feature (1)..(12227): myosin VA heavy chain 12 myoxin MYO5A
accccgggcaggtggagcgctcgcggctgctcgcggcgagcccgggagtgatggcgaggcccctgcgggcggccagcgcctgaggcgccccgccccgccccgccccgcgcggccctccccgcccggccctgccctgccctgctccctgccggcggctgcgggcgcttcctagtccgctcgggcggccgcccaggcgaggtgcggcctccgcacaggcggggggcgtaggcgcgcggggcccgccatggctgcgtcggagctctacacaaagtttgccagggtttggatacctgatccagaggaagtctggaagtcagcagagctgctcaaagattataagccaggagataaagtcctcctgcttcacctcgaggaaggaaaggatttggaataccatctagatccaaagaccaaggagctgcctcacttacgaaatcctgacatacttgttggtgaaaatgacctcacagccctcagctatcttcatgagcctgctgtgctccataatctcagagtccgctttattgattccaaacttatttatacgtattgtggtatagtcctagtagctataaatccctatgaacagctgcctatttatggagaagatattattaatgcatacagtggtcagaacatgggtgatatggatccacatatctttgcagtagctgaagaagcttacaagcaaatggccagagatgaacgaaatcagtccatcatcgtaagtggagagtctggggcaggaaaaacagtctcagctaagtatgccatgcgatactttgcaactgtgagtggttctgccagtgaggccaatgtggaggaaaaggtcttggcctccaaccccatcatggagtccattggaaatgctaaaacaaccaggaatgataatagcagccgttttgggaagtatattgagattggttttgataagagatatcgaatcattggtgccaatatgagaacttatcttttagagaaatccagagtggtattccaggcagaagaggagagaaactatcatatcttctatcagctttgtgcctcagcaaagttacctgaatttaaaatgctacgattaggaaatgcagataactttaattacacaaaacaaggaggcagtcctgtgattgaaggagtggatgatgcaaaggagatggcacatactaggcaggcctgcactttgctaggaattagtgaatctcatcaaatgggaattttccgaatacttgctggcatccttcacttaggcaatgttggatttacatcccgagatgcagacagctgcacaatacctcccaagcatgaacctctctgcatcttctgtgaactcatgggtgtggactatgaggagatgtgtcactggctctgccatcggaaactggctactgccacagagacatacatcaagcccatctccaagctgcaggccacaaatgcccgcgatgctttggccaagcacatctatgccaagctctttaactggattgtagataatgtcaatcaggctctccattctgctgtcaaacagcactcttttattggtgtgctagacatttacggatttgaaacatttgagataaatagttttgaacagttttgcataaattatgcaaatgaaaaactacagcaacaattcaatatgcatgtcttcaaattggagcaagaagaatatatgaaggaacaaattccatggacactcatagatttttatgataatcagccttgtattaatcttatagaatcaaaactaggcattctagatttactggatgaggaatgcaagatgcctaaaggcacagatgacacctgggcccaaaaattgtacaacacacatttgaacaaatgtgcactctttgaaaagcctcgtctatcaaacaaagctttcatcatccaacattttgctgacaaagtggaataccagtgtgaaggatttctcgaaaagaataaagacaccgtttttgaagaacaaattaaagttcttaaatcaagcaagtttaagatgctaccagaactatttcaagatgatgagaaggccatcagtccaacttcagccacctcctcagggcgcacacccctcacacgaactcctgcaaagcccaccaaaggcagaccaggccaaatggccaaagagcacaagaaaacagtggggcatcagttcagaaactccctgcacctgcttatggagacactcaatgccactacccctcactatgtgcgctgtatcaagcctaatgacttcaagttcccattcacgtttgatgagaagagggcagtgcagcagctgagagcatgtggtgtcctggaaaccatccgaatcagtgcggccggtttcccctcacggtggacttaccaagaatttttcagccgctaccgtgtcctaatgaagcagaaagatgtgctgagtgacagaaagcaaacatgcaagaatgtgttagagaaactgatactggacaaggacaaataccagtttggtaagacaaagatctttttccgtgccggtcaagtggcctatctagaaaaattgagagctgacaaactgagagctgcctgcatccggatccagaagaccatccgagggtggctgctgagaaagaagtacctacgcatgcggaaggcagccatcaccatgcagagatacgtgcggggctaccaggcccgatgctatgctaagtttctgcgcagaaccaaggcagcaaccatcattcaaaagtactggcgcatgtatgtggtccgcaggaggtacaagattagacgagctgccactatcgttcttcagtcttacttgcgaggcttcttggccagaaataggtatcgcaagatactccgtgagcacaaagcagtcatcattcagaagcgagtccggggctggctggcccgcacacactacaagaggagcatgcatgccatcatctaccttcagtgctgcttcaggcggatgatggccaagcgtgagctaaagaagctcaaaatcgaggctcgctcagtggagcgctataagaagctgcacatcggcatggagaacaagatcatgcagctgcagcgcaaagttgatgagcagaacaaagactacaaatgccttgtggagaaactaaccaatctggaaggaatatacaactctgagactgagaaactacgaagtgacttagaacgtcttcaactaagtgaagaggaagcgaaagttgccactgggcgggtccttagtctgcaggaagaaattgccaagctccggaaagacctggagcaaactcgttcagagaaaaaatgcattgaggaacatgcagatcgatacaaacaagaaacagagcagctggtatcaaatctgaaggaagaaaatactttgctgaagcaagaaaaagaagccctcaatcaccgcatcgtgcagcaggctaaggagatgacagaaactatggagaagaagttagtagaagaaacgaaacaactggaactcgaccttaatgatgaaaggctgagatatcagaaccttctgaatgagttcagtcgcctggaagaaagatatgatgacctcaaggaagagatgacccttatggtgcatgtgcctaagcctggacacaagagaacagactccacccacagcagcaacgagtctgaatatatctttagctctgaaattgcagaaatggaagacattccatcaaggacagaggaaccaagtgagaagaaggtacctctggacatgtcattgttccttaagctccagaagcgggtcacagagctggagcaggagaagcaggtgatgcaggatgagctggaccgcaaggaggagcaggtgctccgcagcaaggccaaggaagaagaaagaccacaaattagaggtgcagaactggaatatgagtcactcaagcgtcaagaactagaatcagaaaacaaaaaactgaagaatgagctaaatgagttgcgcaaggccctcagtgagaaaagtgccccagaggtgaccgccccaggtgcacctgcctaccgtgtcctcatggagcagctgacctctgtgagcgaggagcttgatgtccgcaaggaggaagtcctcatcttaaggtctcaactggtgagccagaaagaggccatccaacccaaggatgacaagaatacaatgacagattccacaatacttttggaagatgtacaaaaaatgaaagataaaggtgaaatagcacaagcatacattggtttgaaagaaacaaatagatcatctgctctggattaccatgagttgaatgaggatggagagctgtggctggtttatgaagggttaaaacaagccaacaggctcctggaatcccagctgcagtcacagaagaggagccatgagaatgaggccgaggccctccgtggggagatccagagcctgaaggaggagaacaaccgacagcagcagctgctggcccagaacctgcagctgcccccagaggcccgcattgaggccagcctgcagcacgagatcacccggctgaccaacgaaaacttggatttgatggaacaacttgaaaaacaggataagacggtccgtaaactgaaaaaacaactgaaagtatttgccaaaaaaattggcgaactagaagtgggccagatggagaacatatccccaggacagatcattgatgaacccatccgaccagtcaacattcccaggaaagaaaaggatttccaagggatgctggaatacaagaaggaggatgagcaaaaacttgttaagaacctgattctggaactgaagccacgtggtgtagcagtcaatttgattccaggattaccggcatatatcctgttcatgtgtgttcgacatgctgactacctgaatgatgatcagaaagtaaggtcgttgctaacatcaacaattaacagcatcaaaaaagtattgaagaaaagaggtgatgattttgaaaccgtctccttctggctctctaacacatgccgatttttgcactgcttgaaacagtacagtggagaagagggctttatgaagcacaacacatctcgccagaatgaacactgcctcaccaattttgacctggctgagtatcggcaggtgctgagtgacttggccattcagatctaccagcagctcgtgcgggtgttagagaacatccttcagccaatgattgtctcaggcatgctggaacatgaaacgattcagggcgtgtctggggtgaagcccacagggttgagaaagcgaacctccagtatcgccgatgagggcacctacacactggactccatcctccggcagctcaactccttccactcggtcatgtgtcagcatggcatggaccctgaactgatcaagcaggtggtcaagcagatgttctacatcataggggccatcaccctgaacaaccttctcctgcggaaggacatgtgctcctggagtaaaggcatgcagatcaggtacaatgtcagtcaactggaagaatggctgcgtgacaagaatctgatgaatagtggggctaaagaaaccctggaacctctcattcaggctgctcaacttttgcaagtgaaaaagaaaacagatgatgatgcagaagccatttgttctatgtgcaatgctttaactactgcccagattgtgaaagtgttgaatttgtatactccagttaatgagtttgaagaaagagtctctgtgtcgttcattcgtactatacagatgcgtttacgagacaggaaagactctccccagctgctcatggatgctaaacacatctttcctgtcacctttcctttcaacccatcttccctcgcactagaaaccatccagattccagccagcctcggcctgggcttcatttcacgggtctgaaagtgatgtccaggcaaaaattgacaatacatttcttgcccgaaataagaacccattatttccagtgagttactgaaaatacatttttaaagagaaagtactgattatctcccaaatgagaagtcattaactggaaatctccctagaatactttcatcactttggaaacaaagataggctctttcgtgctgtgttatctttatagcaacactcatccttaaccaactaggtaccgtgagtttacatacaggagaatgatggaaggaagggaggaaggaaaggaggagaaaaatgtgtcttcagctggcagcatttattttaaatccttagcactgagtttgaatggtataaaaagtataacttccatagatgagctgttgttaggaaggcaccaaagaacctcctctgcactaaacaggagaatggaaagaaaagtctccattgagtacatatcatgtcagtttagtaatcaattatgttgatattgttaaactggttcaaagaaataaactggcaatatgtaaagtaattcctcatttgtgtcactatgatatagagatattaaaggaatgttggtttgctaaatagtatagatgtccatttgtactatagtttactgagcattttaaattgctgctacatactgtcttcttaaaatgtaagtgatattaggcactacaataagtttctcttgtcaattctgtttacaattcaatcagatcacagttttaactggattatatgcaaatacctacagattcacctgcacaagtagcagacactggaaagtcatgtagtaatatgacaaaatgcttgacatttaggggtaggattagacaaagtggctattgttgatgtcattatttattcaggatgtattacattgatgtgctcattaattttccctgggtggatattgcgtcagggtacagtgttctgtgaagtgacttatttttaactaccagatctgattccttcagtgcatattttcaaccttgacaggttttctctcttcttaatttattaagaattaatctcggctgggcgcggtggctcacgcctgtaatcccagcactttgggaagccaaggtgggcggatcacttcaggttaggagttggagaccagcctggccaacatggcgaaaccctgtctctactaaaaatacaaaaattagccgggcgtggtggcacttgcctgtaatcccagctactcgggaggctgaggcacgagaatcgattaaacctgggaggcggagattgcaatgagatcgaaccactgcactccagcctgggtgacagagagagacactgccttggaaaaaaaaagaatctcactcactatctagagaggattgtcagaatattcacgattcaggtcttgaaactttgattatgcaaaagaaggtatataataaatatttcattatgattcagtttttaaggctttgcagcttctataagtgttctcagatgccactagataattttaaaagcatcatattagaaatactttaagaagacttatataagaaatagaagattgttgaattttacagaggatttggttcattaagacccagattctgtaagttttcattctgaaattctagttaaacatattcaccatttttcttaggaatcttatacaataaatccttcaggttgcacaaaagcaaattattagttttcattagaaactctggttctgaattacaatcataggttatataaatttaactgttagatggtctataaatcttattaaaatatgtgcaatatttatggaagtcaaacagcttcatatcagtgataaagattgttattaaaagataaatactgtctgttaatttacatgggcctcaagttcctcgtttataaaataagagagttggacactgattcttaacatctcctccacatttaaaattctctcttctcagcccttagattctagagagaaaaagctgcagttactcagtaagtccattctctgatggaaagaccagtgtgtagtgcctgtcaattccttaggattaatcaaatgtaaaatcacaagtttgtgtagctgtaacctttcttaaatgtacatgatttatgtacatgcttttagaaggtcctactatatttgtattataattagtttaagtaatttttattacatcatgtattgctttattcagtttgaatacatttatttatttatttgcagtatcaaccagaaacactaccaattgcatcaaattctcccagtttttcctggttgtcaatgcggttttcaatgcacaattaagtcatagccatttggttcgtaccaaatgtgtcagaatctaacagcatccgataggctgtaagttggggagttgctaagaaaatgcaacgtggtacaggctgtccgcctcagccctggaaatctcccagacctcccccagcttcatcctgtgtagcacgactcaacgtgcaccctgaatcttctcaggtcttccaggtcatgctgtagctgtcactgccatgcagcccttttttttactccggacagctcatgtactgaagcgtcatgaaagaaaggctgtggtctgagcccttctctcccatctcctgtctttgtcctgtcaagtgctggagccagagctcctacagctgcccttggtggtttctcctgttcagcgatggtggcacaaaggttctgctattccagggctccagcttcctcccaggtctacccagagctccagatgggggtctgaattaacctctcttggtggcctggagatttttagtcattgacaagaataccttgtaaccagggaaccccaaggcccagtaaatgattctgtataccattttcttgaaggtacaagaagattctgccgactatggggatctttgggccagtttgaggattgctttccctctgaggttctttctctctgtcagccacactttctcacccaacttcagacacaccctgccagcctttcccctactcattcactcttccccttccctcaacttaatcgtctatcccgttgcctgctgtttgactgtgcactgaaggcaggtggatggagtcagtcctcagttgcccctgctggccttcctggtgcttaccatcagcccaatctttgcacagtccttgttgttcttacttctctgcatgcattccttcagaagatcagtcatcaactttttcttaattcctctgtgacacacaatgggaattcaaaggaagagatcttaaaagtcacaacagttctttatcttaataatcccctccccattcaccttactacatgcagactcacctcacacccttacaacttgaagctgaaaatttaaaagtaatttccctttttgcagcttttcctcaggttaaggctttgatctgcctgagagtaactctaaaaggagggaagataaatatgggataaaatccacaaagtgtagcttctaattcctttggaagtttaaaaaatttccacatatctgatgcttcttttgtcaggtgcagaagcacaaaaacatattccgaagccaactgatagggaatttggggattattgtcagtttggagaatttgctgtgttatttcttcatttccatggatagctcatagttggctctttctgggtgagtaattatgtgtaatatagatcaaatcttttactaaggttacagctacatgttaggggaggctatgaaaatactatattattataatttcagtgcagtgattgttgtgagaaataactttcatggtaaccctaggaaaatgggcacctgccaccatcctgagaagtcctcacacaatgccctttctctcttacacacacacacacacacatacacacacacacacccccgtcactaattcatagagttccttagcaggcatagtcaaggatcctctgggtaatgtcagctgcttagtgataaaacagagccaaaactagtgcatcctgttgaaagtaatgcagaaacagtacctgggtccagatatgctttcctgcggcgctttcctctgttacctcgtttcatcctcacagcagcatggacggtaggtggggtcgcttctacaatcatttctgatgatagcttgggaatagagataggggcagtgacttgcctgatgtcgcacagccctctggctgtcctgctttcccatatggagcagtggtggtgtgggcacctgtgatgcaggagactttaaaaatgtcgtgaggtcacgtgctgcccctcctggtacgtgtggaatgcccctggccagcaaggggtgcttttttatcagagttggcagctggcatgtgggaaccgagcaagtgctgcgtaccaagttacttgttttaaggagaccaagtgctcagcgccaggtggttttcttttttgtcatagttacttgctataactcagcttgacttctgtcatgaatcagtgctctctgggaggatgcaatactctgtttgggcattaattggtagcaggttgtctcaaccaaaaagacaggaaacagcaaaagcctctctgaaattaagaggaaagttactctccccacacccatcagagtctttattggagccaccaggtgagctgtgcagcctggacaggcctgcagctataggccaccttcccagtttaggtcctcagcacaggggagcccaagtcactgggtgccttccgagggctgtcactgggcaggccatatacaagtcagtgtgtgcgtgggcactgcagtgtgtgcatgccgtaggtgttgatgggtgctaggaggggtgtcgtgtgcatgcgcgttgaagaggatctgtattgccgtgacctctgttcatggatgagtgcattgtaatttgttctcaggctgtgctgtgagggccgccttaacccttgctcccttcccttctagagctgccttaagttctccagaacttttcttctgtaaaggatatcttgcctggaagggatatcttgccctgtttctcaaggttttgtgagagttttgactggatgtggccctgcatgaccctccttctcctgtacttcctctttcctttccaaatgggaattagaactgtggggcagcaacagtctcagagccagtgagaggccagcttagagaatgcttctgagttagtgggactctgtgtcacaagtaagcaaatgaatatatgaaagaaattatggagataagttagattcttggtaatacttaaatgtcttgctttctactaaccttttgttactaaaggtaaagggtataactcaaactttttgtggacattcttttcaaaattttttaagaaccctgtactataaaaggttgagtaaaaacaggaaagcgtgctataagttcaaatctgttgtattaccctaaattagataaaccaacctgaattatagtagatttctcaatagatgaggaactgaaaaatactatgtaaaatatcttccaaaatgctttttatactttttttatttgtaatttggtctatctaaaatgttcgttagcttaacttaatgggcgttattggattcatatgactaacgtttcctcagtattgtaatgcttgaaatatttgaaagaaaaaatgttgttttttagttgaaactggtatatataattcagtgcttggcaggttagtatatttttatgcatttttcagagtcagcagtttcaaatcttattgttatcatgttataaaattttagcccacatttcaggctccgtaaatcatttgagccattattttttcccaacaaatggtgaattttttctttaaatgtggatatatatgttgtaatttatgattcctggttatgtatttttgtgggatcctgcagtaaaattgacttttttgtgtctttgggagatttaaattgcgctaacagtgttgcgcaaaaatgagttcatgccatttaacatattgtattttaattattaactgtattaatttactatgaaatggacatccttttaactaaaatggaattgaacattgcagttttcaaatatttttccttgttgggtctggaaaaggaattctactttgatctgcatagaaaattttgatacaattttttgaaagttcttaggtgaaacatttacccattaaaaaggaagcagaaatactgagacatgaaaggcattatcaactaactctagactctagaacccattctagcatatctcacgtgcaatttttaaaaataagttaataattcatctcatatcaacaaaagcctttgaaacatgggttttcactagatatcacctagtgctaagataaaaaccaaaacaatatcagaattacatttatgctctaaatttgtagttgtccattgttgtgcttagtaaatgtgtgtcattaatgctgtattctcctagctattatggaaacttgtttaaataaagatatggatataaaga

1. A method of designing a modulator of a myosin, the method comprising molecular modeling of a compound such that the modeled compound interacts with at least three amino acid residues of said myosin, said residues being selected from
(a) ranges K265-V268, V411-L441, N588-Q593, D614-T629, and V630-E646 of SEQ ID NO: 2, said myosin comprising or consisting of
(i) the sequence of SEQ ID NO: 2;
(ii) the sequence encoded by the sequence of SEQ ID NO: 1;
(iii) a sequence being at least 40% identical to the sequence of SEQ ID NO: 2 or to the sequence encoded by the sequence of SEQ ID NO: 1; or
(iv) a sequence encoded by a sequence being at least 40% identical to the sequence of SEQ ID NO: 1;
wherein said sequence of (iii) or (iv) comprises said three amino acid residues, and wherein said residues comprise K265; or
(b) ranges of any one of SEQ ID NOs: 4, 6, 8, 10, 12, 14, 16, 18, 20, 22, 24, 26, 28, 30, 32, 34, 36, 38, 40, 42, 44, 46, 48, 50, 52, 54, 56, 58, 60, 62, 64, 66, 68, 70, 72, 74, 76, 78, 80, 82, 84, 86, 88, 90, 92, 94, 96, 98, 100, 102, 104, 106 or 108, respectively, said ranges aligning with the ranges of SEQ ID NO: 2 as defined in (a), said myosin comprising or consisting of
(i) the sequence of any one of SEQ ID NO: 4, 6, 8, 10, 12, 14, 16, 18, 20, 22, 24, 26, 28, 30, 32, 34, 36, 38, 40, 42, 44, 46, 48, 50, 52, 54, 56, 58, 60, 62, 64, 66, 68, 70, 72, 74, 76, 78, 80, 82, 84, 86, 88, 90, 92, 94, 96, 98, 100, 102, 104, 106 or 108, respectively;
(ii) the sequence encoded by the sequence of any one of SEQ ID NO: 3, 5, 7, 9, 11, 13, 15, 17, 19, 21, 23, 25, 27, 29, 31, 33, 35, 37, 39, 41, 43, 45, 47, 49, 51, 53, 55, 57, 59, 61, 63, 65, 67, 69, 71, 73, 75, 77, 79, 81, 83, 85, 87, 89, 91, 93, 95, 97, 99, 101, 103, 105, 107 or 109, respectively;
(iii) a sequence being at least 40% identical to the sequence of any one of SEQ ID NO: 4, 6, 8, 10, 12, 14, 16, 18, 20, 22, 24, 26, 28, 30, 32, 34, 36, 38, 40, 42, 44, 46, 48, 50, 52, 54, 56, 58, 60, 62, 64, 66, 68, 70, 72, 74, 76, 78, 80, 82, 84, 86, 88, 90, 92, 94, 96, 98, 100, 102, 104, 106 or 108, respectively, or to the sequence encoded by the sequence of any one of SEQ ID NO: 3, 5, 7, 9, 11, 13, 15, 17, 19, 21, 23, 25, 27, 29, 31, 33, 35, 37, 39, 41, 43, 45, 47, 49, 51, 53, 55, 57, 59, 61, 63, 65, 67, 69, 71, 73, 75, 77, 79, 81, 83, 85, 87, 89, 91, 93, 95, 97, 99, 101, 103, 105, 107 or 109, respectively; or
(iv) a sequence encoded by a sequence being at least 40% identical to the sequence of any one of SEQ ID NO: 3, 5, 7, 9, 11, 13, 15, 17, 19, 21, 23, 25, 27, 29, 31, 33, 35, 37, 39, 41, 43, 45, 47, 49, 51, 53, 55, 57, 59, 61, 63, 65, 67, 69, 71, 73, 75, 77, 79, 81, 83, 85, 87, 89, 91, 93, 95, 97, 99, 101, 103, 105, 107 or 109, respectively;
wherein said sequence of (iii) or (iv) comprises said three amino acid residues, and wherein said residues comprise the residue aligning with K265 of SEQ ID NO: 2;
thereby obtaining said modulator of a myosin.

2. The method of claim 1, further comprising synthesizing said modulator, thereby producing said modulator.

3. The method of claim 1 or 2, wherein said molecular modeling comprises
(i) measuring at least one intermolecular distance; and/or
(ii) calculating at least one free energy of interaction.

4. The method of any one of claims 1 to 3, wherein said ranges as defined in claim 1 (a) are limited to the following positions: K265, A420, K423, A424, R428, L431, D590, I617, and A618.

5. A method of identifying a modulator of a myosin, the method comprising
(a) bringing into contact a myosin and a test compound;
(b) determining whether said test compound interacts with at least three amino acid residues selected from
(ba) ranges K265-V268, V411-L441, N588-Q593, D614-T629, and V630-E646 of SEQ ID NO: 2, said myosin comprising or consisting of
(i) the sequence of SEQ ID NO: 2;
(ii) the sequence encoded by the sequence of SEQ ID NO: 1;
(iii) a sequence being at least 40% identical to the sequence of SEQ ID NO: 2 or to the sequence encoded by the sequence of SEQ ID NO: 1; or
(iv) a sequence encoded by a sequence being at least 40% identical to the sequence of SEQ ID NO: 1;
wherein said sequence of (iii) or (iv) comprises said three amino acid residues, and wherein said residues comprise K265; or
(bb) ranges of any one of SEQ ID NOs: 4, 6, 8, 10, 12, 14, 16, 18, 20, 22, 24, 26, 28, 30, 32, 34, 36, 38, 40, 42, 44, 46, 48, 50, 52, 54, 56, 58, 60, 62, 64, 66, 68, 70, 72, 74, 76, 78, 80, 82, 84, 86, 88, 90, 92, 94, 96, 98, 100, 102, 104, 106 or 108, respectively, said ranges aligning with the ranges of SEQ ID NO: 2 as defined in (a), said myosin comprising or consisting of
(i) the sequence of any one of SEQ ID NO: 4, 6, 8, 10, 12, 14, 16, 18, 20, 22, 24, 26, 28, 30, 32, 34, 36, 38, 40, 42, 44, 46, 48, 50, 52, 54, 56, 58, 60, 62, 64, 66, 68, 70, 72, 74, 76, 78, 80, 82, 84, 86, 88, 90, 92, 94, 96, 98, 100, 102, 104, 106 or 108, respectively;
(ii) the sequence encoded by the sequence of any one of SEQ ID NO: 3, 5, 7, 9, 11, 13, 15, 17, 19, 21, 23, 25, 27, 29, 31, 33, 35, 37, 39, 41, 43, 45, 47, 49, 51, 53, 55, 57, 59, 61, 63, 65, 67, 69, 71, 73, 75, 77, 79, 81, 83, 85, 87, 89, 91, 93, 95, 97, 99, 101, 103, 105, 107 or 109, respectively;
(iii) a sequence being at least 40% identical to the sequence of any one of SEQ ID NO: 4, 6, 8, 10, 12, 14, 16, 18, 20, 22, 24, 26, 28, 30, 32, 34, 36, 38, 40, 42, 44, 46, 48, 50, 52, 54, 56, 58, 60, 62, 64, 66, 68, 70, 72, 74, 76, 78, 80, 82, 84, 86, 88, 90, 92, 94, 96, 98, 100, 102, 104, 106 or 108, respectively, or to the sequence encoded by the sequence of any one of SEQ ID NO: 3, 5, 7, 9, 11, 13, 15, 17, 19, 21, 23, 25, 27, 29, 31, 33, 35, 37, 39, 41, 43, 45, 47, 49, 51, 53, 55, 57, 59, 61, 63, 65, 67, 69, 71, 73, 75, 77, 79, 81, 83, 85, 87, 89, 91, 93, 95, 97, 99, 101, 103, 105, 107 or 109, respectively; or
(iv) a sequence encoded by a sequence being at least 40% identical to the sequence of any one of SEQ ID NO: 3, 5, 7, 9, 11, 13, 15, 17, 19, 21, 23, 25, 27, 29, 31, 33, 35, 37, 39, 41, 43, 45, 47, 49, 51, 53, 55, 57, 59, 61, 63, 65, 67, 69, 71, 73, 75, 77, 79, 81, 83, 85, 87, 89, 91, 93, 95, 97, 99, 101, 103, 105, 107 or 109, respectively;
wherein said sequence of (iii) or (iv) comprises said three amino acid residues, and wherein said residues comprise the residue aligning with K265 of SEQ ID NO: 2; and
(c) identifying those compounds which interact with said at least three amino acid residues,
thereby identifying said modulator of a myosin.

6. The method of claim 5, wherein said determining in step (b) is effected by X-ray crystallography and/or NMR spectroscopy.

7. The method of claim 5 or 6, further comprising the step of
(a′) (i) determining whether said test compound binds to said myosin; and/or
(ii) determining whether said test compound modulates the activity and/or conformation of said myosin; and/or
(iii) determining the cytotoxicity of said test compound;
wherein step (a) is to be effected after step (a) and prior to step (b), and wherein said determining in step (b) is performed with test compounds determined to bind, to modulate, and/or to be cytotoxic in step (a′).

8. The method of claim 7, wherein said activity is the capability of said myosin
(i) to bind actin;
(ii) to convert ATP into ADP and Pᵢ; and/or
(iii) to generate force and/or movement.

9. The method of any one of the preceding claims, wherein molecular modeling according to any one of claims 1 to 3 starts from a compound selected from compounds of the general formulae (1) to (4) or a salt or solvate thereof, or the test compound of any one of claims 4 to 7 is selected from compounds of the general formulae (1) to (4) or a salt or solvate thereof [chemical structure]
wherein
X is selected from NH, O and S; and
Y and Z designate, as valence permits, one or more substituents, wherein each occurrence of Y and Z is independently selected from F, Cl, Br, I, R and OR;
R being selected from (i) H, (ii) (CO)CH₃, and (iii) linear or branched alkyl, alkenyl or alkinyl with one to four carbon atoms, the moieties (ii) and (iii) being optionally substituted with one or more F, Cl, Br and/or I.

10. Use of a compound selected from compounds of the general formulae (1) to (4) or a salt or solvate thereof as a lead compound in the development of a modulator of a myosin.

11. The method of claim 9 or the use of claim 10, wherein said general formulae are the general formulae (1) or (2).

12. The method of any one of claim 1 to 9 or 11, or the use of claim 10 or 11, wherein said modulator is an inhibitor.

13. A pharmaceutical composition comprising one or more compounds selected from compounds of the general formulae (1), (2) and (4) as defined in claim 9; 2,3,4-tribromo-5-(1′-methoxy-2′,4′-difluoro-phenyl)-pyrrol; and the compounds shown below, wherein CF₃ may replace one, more or all occurrences of F, Cl, Br and/or MeO in said compounds shown below: [chemical structure]
or a salt or solvate thereof.

14. Use of one or more compounds as defined in claim 13 for the manufacture a pharmaceutical composition for the treatment and/or prevention of cardiovascular diseases, cancer, diseases of the central nervous system, viral infections, and infections by parasites of the Apicomplexa family.

15. A compound of the following formula
A-L-B,
wherein A is selected from compounds of the general formulae (1) to (4) as defined in claim 9, L is a linker, B is blebbistatin or an analogue thereof, and “—” is a covalent bond.

16. The pharmaceutical composition of claim 13, the use of claim 14, or the compound of claim 15, wherein said one or more compounds of claim 13 or 14 or the compound A of claim 15 are selected from compounds of the formulae (1′), (2′) and (3′): [chemical structure]
wherein Y₁, Y₂, Y₃, Y₄, Y₅, Y₆, and Y₇ are independently selected from H, F, Cl, Br, I, R and OR;
R being selected from (i) H, (ii) (CO)CH₃, and (iii) linear or branched alkyl, alkenyl or alkinyl with one to four carbon atoms, optionally substituted with one or more F, Cl, Br and/or I; or a salt or solvate thereof.

17. The pharmaceutical composition, the use, or the compound of claim 16, wherein
(i) Y₁, Y₄ and Y₆ of formula (1′) are H; and/or
(ii) Y₁, Y₄, Y₆ and Y₇ of formula (2′) are H.

18. The pharmaceutical composition, the use, or the compound of claim 17, wherein furthermore
(i) Y₇ of formula (1′) is H; and/or
(ii) Y₂ of formula (2′) is H.
